United States Patent Application Publication US 2026/0327306 A1, published October 22, 2026 (application 19/642,327).

The application's sequence listing, which the Patent Office published only in electronic form, follows.

SEQUENCE LISTING (8703 sequences)

SEQ ID NO: 1 - protein, 119 aa, synthetic construct
QVQLQQSGPELVKPGTSVKISCKASGYSFTTYYIHWVKQRPGQGLEWIGWFFPGSGNIKYNEKFKGKATLTADTSSSTAYMQLSSLTSEESAVYFCAGSYYSYDVLDYWGHGTTLTVSS

SEQ ID NO: 2 - protein, 107 aa, synthetic construct
DILMTQSQKFMSTSLGDRVSVSCKASQNVGINVVWHQQKPGQSPKALIYSSSHRYSGVPDRFTGSGSGTDFTLTINNVQSEDLAEYFCQQFKSYPLTFGAGTKLELK

SEQ ID NO: 3 - protein, 10 aa, synthetic construct
GYSFTTYYIH

SEQ ID NO: 4 - protein, 17 aa, synthetic construct
WFFPGSGNIKYNEKFKG

SEQ ID NO: 5 - protein, 10 aa, synthetic construct
SYYSYDVLDY

SEQ ID NO: 6 - protein, 11 aa, synthetic construct
KASQNVGINVV

SEQ ID NO: 7 - protein, 7 aa, synthetic construct
SSSHRYS

SEQ ID NO: 8 - protein, 9 aa, synthetic construct
QQFKSYPLT

SEQ ID NO: 9 - protein, 119 aa, synthetic construct
QVQLVQSGAEVKKPGSSVKVSCKASGYSFTTYYIHWVRQAPGQGLEWMGWFFPGSGNIKYNEKFKGRVTITADTSTSTAYMELSSLRSEDTAVYYCAGSYYSYDVLDYWGQGTTVTVSS

SEQ ID NO: 10 - protein, 107 aa, synthetic construct
DIQMTQSPSFLSASVGDRVTITCKASQNVGINVVWHQQKPGKAPKALIYSSSHRYSGVPSRFSGSGSGTEFTLTISSLQPEDFATYFCQQFKSYPLTFGQGTKLEIK

SEQ ID NO: 11 - protein, 107 aa, synthetic construct
DIQMTQSPSSLSASVGDRVTITCKASQNVGINVVWHQQKPGKVPKALIYSSSHRYSGVPSRFSGSGSGTDFTLTISSLQPEDVATYFCQQFKSYPLTFGQGTKLEIK

SEQ ID NO: 12 - DNA, 357 bp, synthetic construct
  source 1..357: mol_type = other DNA
caggtgcagctggttcagtctggcgccgaagtgaagaaacctggctcctccgtgaaggtgtcctgcaaggcttccggctactccttcaccacctactacatccactgggtccgacaggcccctggacaaggattggaatggatgggctggttcttccccggctccggcaacatcaagtacaacgagaagttcaagggccgcgtgaccatcaccgccgacacctctacctctaccgcctacatggaactgtccagcctgagatctgaggacaccgccgtgtactactgcgccggctcctactactcttacgacgtgctggattactggggccagggcaccacagtgacagtgtcctct

SEQ ID NO: 13 - protein, 108 aa, synthetic construct
DSVTTQSPLSLPVTLGQPASISCSGEKLSDKYVHWYQQRPGQSPRMLIYENDRRPSGVPDRFSGSNSGNDATLKISRVEAEDVGVYFCQFWDSTNSAVFGGGTKVEIK

SEQ ID NO: 14 - DNA, 321 bp, synthetic construct
  source 1..321: mol_type = other DNA
gacatccagatgacccagtctccatcctctctgtccgcctctgtgggcgacagagtgaccatcacatgcaaggcctctcagaacgtgggcatcaacgtcgtgtggcaccagcagaaacctggcaaggtgcccaaggctctgatctactcctccagccacagatactccggcgtgccctctagattctccggctctggctctggcaccgactttaccctgacaatctccagcctgcagcctgaggacgtggccacctacttttgccagcagttcaagagctaccctctgacctttggccagggcaccaagctggaaatcaag

SEQ ID NO: 15 - protein, 117 aa, synthetic construct
DVQLVESGGGLVQPGGSRKLSCAASGFTFSNFGMHWVRQAPDKGLEWVAYISSGSSTIYYADTLKGRFTISRDNPKNTLFLQMTSLRSEDTAMYYCARRGEGAMDYWGQGTSVTVSS

SEQ ID NO: 16 - protein, 106 aa, synthetic construct
ENVLTQSPAIMSASLGEKVTMSCRASSSVNYIYWYQQKSDASPKLWIYYTSNLAPGVPTRFSGSGSGNSYSLTISSMEGEDAATYYCQQFTSSPFTFGSGTKLEIK

SEQ ID NO: 17 - protein, 10 aa, synthetic construct
GFTFSNFGMH

SEQ ID NO: 18 - protein, 17 aa, synthetic construct
YISSGSSTIYYADTLKG

SEQ ID NO: 19 - protein, 8 aa, synthetic construct
RGEGAMDY

SEQ ID NO: 20 - protein, 10 aa, synthetic construct
RASSSVNYIY

SEQ ID NO: 21 - protein, 7 aa, synthetic construct
YTSNLAP

SEQ ID NO: 22 - protein, 9 aa, synthetic construct
QQFTSSPFT

SEQ ID NO: 23 - protein, 117 aa, synthetic construct
QVQLVESGGGVVQPGRSLRLSCAASGFTFSNFGMHWVRQAPGKGLEWVAYISSGSSTIYYADTLKGRFTISRDNSKNTLYLQMNSLRAEDTAVYYCARRGEGAMDYWGQGTTVTVSS

SEQ ID NO: 24 - protein, 11 aa, synthetic construct
WGQGTMVTVSS

SEQ ID NO: 25 - protein, 117 aa, synthetic construct
EVQLVESGGGLVQPGGSLRLSCAASGFTFSNFGMHWVRQAPGKGLEWVSYISSGSSTIYYADTLKGRFTISRDNSKNTLYLQMNSLRAEDTAVYYCARRGEGAMDYWGQGTTVTVSS

SEQ ID NO: 26 - protein, 11 aa, synthetic construct
SGEKLSDKYVH

SEQ ID NO: 27 - protein, 106 aa, synthetic construct
DNQLTQSPSSLSASVGDRVTITCRASSSVNYIYWYQQKPGKAPKLLIYYTSNLAPGVPSRFSGSGSGNDYTLTISSLQPEDFATYYCQQFTSSPFTFGQGTKLEIK

SEQ ID NO: 28 - protein, 7 aa, synthetic construct
ENDRRPS

SEQ ID NO: 29 - protein, 105 aa, synthetic construct
QNVLTQPPSASGTPGQRVTISCRASSSVNYIYWYQQLPGTAPKLLIYYTSNLAPGVPDRFSGSGSGNSYSLAISGLRSEDEADYYCQQFTSSPFTFGTGTKVTVL

SEQ ID NO: 30 - protein, 10 aa, synthetic construct
QFWDSTASAV

SEQ ID NO: 31 - DNA, 351 bp, synthetic construct
  source 1..351: mol_type = other DNA
gaggtgcagctggttgaatctggcggaggattggttcagcctggcggctctctgagactgtcttgtgccgcttctggcttcaccttctccaacttcggcatgcactgggtccgacaggcccctggaaaaggactggaatgggtgtcctacatctcctccggctcctccaccatctactacgctgacaccctgaagggcagattcaccatctctcgggacaacgccaagaactccctgtacctgcagatgaacagcctgagagccgaggacaccgccgtgtactactgtgctagaagaggcgagggcgccatggattattggggccagggaaccacagtgaccgtgtctagc

SEQ ID NO: 32 - DNA, 351 bp, synthetic construct
  source 1..351: mol_type = other DNA
gaggtgcagctggttgaatctggcggaggattggttcagcctggcggctctctgagactgtcttgtgccgcttctggcttcaccttctccaacttcggcatgcactgggtccgacaggcccctggaaaaggactggaatgggtgtcctacatctcctccggctcctccaccatctactacgctgacaccctgaagggcagattcaccatcagccgggacaactccaagaacaccctgtacctgcagatgaactccctgagagccgaggacaccgccgtgtactactgtgctagaagaggcgagggcgccatggattattggggccagggaaccacagtgaccgtgtctagc

SEQ ID NO: 33 - DNA, 351 bp, synthetic construct
  source 1..351: mol_type = other DNA
caggtgcagctggtggaatctggtggcggagttgtgcagcctggcagatccctgagactgtcttgtgccgcctctggcttcaccttctccaacttcggcatgcactgggtccgacaggcccctggaaaaggattggagtgggtcgcctacatctcctccggctcctccaccatctactacgctgacaccctgaagggcagattcaccatcagccgggacaactccaagaacaccctgtacctgcagatgaactccctgagagccgaggacaccgccgtgtactactgtgctagaagaggcgagggcgccatggattattggggccagggaaccacagtgaccgtgtctagc

SEQ ID NO: 34 - protein, 14 aa, synthetic construct
WVRQAPGKGLEWVG

SEQ ID NO: 35 - DNA, 317 bp, synthetic construct
  source 1..317: mol_type = other DNA
ataaccagctgacccagtctccttccagcctgtctgcttctgtgggcgacagagtgacaattacctgccgggcctcctcctccgtgaactacatctactggtatcagcagaagcccggcaaggcccctaagctgctgatctactacacctccaatctggcccctggcgtgccctctagattttccggatctggctccggcaacgactataccctgacaatctccagcctgcagcctgaggacttcgccacctactactgccagcagttcacctcctctccattcacctttggccagggcaccaagctggaaatcaaa

SEQ ID NO: 36 - protein, 32 aa, synthetic construct
RFTISRDTSKNTFYLQMNSLRAEDTAVYYCAR

SEQ ID NO: 37 - DNA, 315 bp, synthetic construct
  source 1..315: mol_type = other DNA
cagaatgtgctgacccaacctccttccgcctctggcacacctggacagagagtgacaatctcctgccgggcctcctcctccgtgaactacatctactggtatcagcagctgcccggcaccgctcctaaactgctgatctactacacctccaatctggcccctggcgtgcccgatagattttccggatctggctccggcaactcctacagcctggctatctctggcctgagatctgaggacgaggccgactactactgccagcagttcacctcctctccattcacctttggcaccggcaccaaagtgacagttctt

SEQ ID NO: 38 - DNA, 315 bp, synthetic construct
  source 1..315: mol_type = other DNA
tctaatgagctgacccagcctccttccgtgtccgtgtctcctggacagaccgccagaattacctgccgggcctcctcctccgtgaactacatctactggtatcagcagaagtccggccaggctcctgtgctcgtgatctactacacctccaatctggcccctggcatccctgagagattctccggatctggctccggcaacatgtacaccctgaccatctctggcgcccaggtggaagatgaggccgactactactgccagcagttcacctcctctccattcacctttggcaccggcaccaaagtgacagttctt

SEQ ID NO: 39 - protein, 107 aa, synthetic construct [sequence omitted]

SEQ ID NO: 40 - protein, 326 aa, synthetic construct
ASTKGPSVFPLAPCSRSTSESTAALGCLVKDYFPEPVTVSWNSGALTSGVHTFPAVLQSSGLYSLSSVVTVPSSSLGTKTYTCNVDHKPSNTKVDKRVESKYGPPCPPCPAPEFLGGPSVFLFPPKPKDTLMISRTPEVTCVVVDVSQEDPEVQFNWYVDGVEVHNAKTKPREEQFNSTYRVVSVLTVLHQDWLNGKEYKCKVSNKGLPSSIEKTISKAKGQPREPQVYTLPPSQEEMTKNQVSLTCLVKGFYPSDIAVEWESNGQPENNYKTTPPVLDSDGSFFLYSRLTVDKSRWQEGNVFSCSVMHEALHNHYTQKSLSLSLG

SEQ ID NO: 41 - protein, 330 aa, synthetic construct
ASTKGPSVFPLAPSSKSTSGGTAALGCLVKDYFPEPVTVSWNSGALTSGVHTFPAVLQSSGLYSLSSVVTVPSSSLGTQTYICNVNHKPSNTKVDKRVEPKSCDKTHTCPPCPAPELLGGPSVFLFPPKPKDTLMISRTPEVTCVVVDVSHEDPEVKFNWYVDGVEVHNAKTKPREEQYNSTYRVVSVLTVLHQDWLNGKEYKCKVSNKALPAPIEKTISKAKGQPREPQVYTLPPSREEMTKNQVSLTCLVKGFYPSDIAVEWESNGQPENNYKTTPPVLDSDGSFFLYSKLTVDKSRWQQGNVFSCSVMHEALHNHYTQKSLSLSPGK

SEQ ID NO: 42 - protein, 330 aa, synthetic construct
ASTKGPSVFPLAPSSKSTSGGTAALGCLVKDYFPEPVTVSWNSGALTSGVHTFPAVLQSSGLYSLSSVVTVPSSSLGTQTYICNVNHKPSNTKVDKRVEPKSCDKTHTCPPCPAPELLGGPSVFLFPPKPKDTLMISRTPEVTCVVVDVSHEDPEVKFNWYVDGVEVHNAKTKPREEQYASTYRVVSVLTVLHQDWLNGKEYKCKVSNKALPAPIEKTISKAKGQPREPQVYTLPPSREEMTKNQVSLTCLVKGFYPSDIAVEWESNGQPENNYKTTPPVLDSDGSFFLYSKLTVDKSRWQQGNVFSCSVMHEALHNHYTQKSLSLSPGK

SEQ ID NO: 43-44 - skipped (2 entries)

SEQ ID NO: 45 - protein, 5 aa, synthetic construct
TYYIH

SEQ ID NO: 46 - protein, 17 aa, synthetic construct
WFFPGSGNIKYNEKFKG

SEQ ID NO: 47 - protein, 10 aa, synthetic construct
SYYSYDVLDY

SEQ ID NO: 48 - protein, 7 aa, synthetic construct
GYSFTTY

SEQ ID NO: 49 - protein, 6 aa, synthetic construct
FPGSGN

SEQ ID NO: 50 - protein, 10 aa, synthetic construct
SYYSYDVLDY

SEQ ID NO: 51 - protein, 11 aa, synthetic construct
KASQNVGINVV

SEQ ID NO: 52 - protein, 7 aa, synthetic construct
SSSHRYS

SEQ ID NO: 53 - protein, 9 aa, synthetic construct
QQFKSYPLT

SEQ ID NO: 54 - protein, 11 aa, synthetic construct
KASQNVGINVV

SEQ ID NO: 55 - protein, 7 aa, synthetic construct
SSSHRYS

SEQ ID NO: 56 - protein, 9 aa, synthetic construct
QQFKSYPLT

SEQ ID NO: 57 - protein, 5 aa, synthetic construct
NFGMH

SEQ ID NO: 58 - protein, 17 aa, synthetic construct
YISSGSSTIYYADTLKG

SEQ ID NO: 59 - protein, 8 aa, synthetic construct
RGEGAMDY

SEQ ID NO: 60 - protein, 7 aa, synthetic construct
GFTFSNF

SEQ ID NO: 61 - protein, 6 aa, synthetic construct
SSGSST

SEQ ID NO: 62 - protein, 8 aa, synthetic construct
RGEGAMDY

SEQ ID NO: 63 - protein, 10 aa, synthetic construct
RASSSVNYIY

SEQ ID NO: 64 - protein, 7 aa, synthetic construct
YTSNLAP

SEQ ID NO: 65 - protein, 9 aa, synthetic construct
QQFTSSPFT

SEQ ID NO: 66 - protein, 10 aa, synthetic construct
RASSSVNYIY

SEQ ID NO: 67 - protein, 7 aa, synthetic construct
YTSNLAP

SEQ ID NO: 68 - protein, 9 aa, synthetic construct
QQFTSSPFT

SEQ ID NO: 69 - protein, 592 aa, synthetic construct
METDTLLLWVLLLWVPGSTGQVQLVQSGAEVKKPGSSVKVSCKASGYSFTTYYIHWVRQAPGQGLEWMGWFFPGSGNIKYNEKFKGRVTITADTSTSTAYMELSSLRSEDTAVYYCAGSYYSYDVLDYWGQGTTVTVSSGSASAPTLFPLVSCENSPSDTSSVAVGCLAQDFLPDSITFSWKYKNNSDISSTRGFPSVLRGGKYAATSQVLLPSKDVMQGTDEHVVCKVQHPNGNKEKNVPLPVIAELPPKVSVFVPPRDGFFGNPRKSKLICQATGFSPRQIQVSWLREGKQVGSGVTTDQVQAEAKESGPTTYKVTSTLTIKESDWLGQSMFTCRVDHRGLTFQQNASSMCVPDQDTAIRVFAIPPSFASIFLTKSTKLTCLVTDLTTYDSVTISWTRQNGEAVKTHTNISESHPNATFSAVGEASICEDDWNSGERFTCTVTHTDLASSLKQTISRPKGVALHRPDVYLLPPAREQLNLRESATITCLVTGFSPADVFVQWMQRGQPLSPEKYVTSAPMPEPQAPGRYFAHSILTVSEEEWNTGETYTCVVAHEALPNRVTERTVDKSTGKPTLYNVSLVMSDTAGTCY

SEQ ID NO: 70 - protein, 492 aa, synthetic construct
METDTLLLWVLLLWVPGSTGQVQLVQSGAEVKKPGSSVKVSCKASGYSFTTYYIHWVRQAPGQGLEWMGWFFPGSGNIKYNEKFKGRVTITADTSTSTAYMELSSLRSEDTAVYYCAGSYYSYDVLDYWGQGTTVTVSSASPTSPKVFPLSLCSTQPDGNVVIACLVQGFFPQEPLSVTWSESGQGVTARNFPPSQDASGDLYTTSSQLTLPATQCLAGKSVTCHVKHYTNPSQDVTVPCPVPSTPPTPSPSTPPTPSPSCCHPRLSLHRPALEDLLLGSEANLTCTLTGLRDASGVTFTWTPSSGKSAVQGPPERDLCGCYSVSSVLPGCAEPWNHGKTFTCTAAYPESKTPLTATLSKSGNTFRPEVHLLPPPSEELALNELVTLTCLARGFSPKDVLVRWLQGSQELPREKYLTWASRQEPSQGTTTFAVTSILRVAAEDWKKGDTFSCMVGHEALPLAFTQKTIDRLAGKPTHVNVSVVMAEVDGTCY

SEQ ID NO: 71 - protein, 479 aa, synthetic construct
METDTLLLWVLLLWVPGSTGQVQLVQSGAEVKKPGSSVKVSCKASGYSFTTYYIHWVRQAPGQGLEWMGWFFPGSGNIKYNEKFKGRVTITADTSTSTAYMELSSLRSEDTAVYYCAGSYYSYDVLDYWGQGTTVTVSSASPTSPKVFPLSLDSTPQDGNVVVACLVQGFFPQEPLSVTWSESGQNVTARNFPPSQDASGDLYTTSSQLTLPATQCPDGKSVTCHVKHYTNSSQDVTVPCRVPPPPPCCHPRLSLHRPALEDLLLGSEANLTCTLTGLRDASGATFTWTPSSGKSAVQGPPERDLCGCYSVSSVLPGCAQPWNHGETFTCTAAHPELKTPLTANITKSGNTFRPEVHLLPPPSEELALNELVTLTCLARGFSPKDVLVRWLQGSQELPREKYLTWASRQEPSQGTTTYAVTSILRVAAEDWKKGETFSCMVGHEALPLAFTQKTIDRMAGKPTHINVSVVMAEADGTCY

SEQ ID NO: 72 - protein, 234 aa, synthetic construct
METDTLLLWVLLLWVPGSTGDIQMTQSPSFLSASVGDRVTITCKASQNVGINVVWHQQKPGKAPKALIYSSSHRYSGVPSRFSGSGSGTEFTLTISSLQPEDFATYFCQQFKSYPLTFGQGTKLEIKRTVAAPSVFIFPPSDEQLKSGTASVVCLLNNFYPREAKVQWKVDNALQSGNSQESVTEQDSKDSTYSLSSTLTLSKADYEKHKVYACEVTHQGLSSPVTKSFNRGEC

SEQ ID NO: 73 - protein, 453 aa, synthetic construct
GSASAPTLFPLVSCENSPSDTSSVAVGCLAQDFLPDSITFSWKYKNNSDISSTRGFPSVLRGGKYAATSQVLLPSKDVMQGTDEHVVCKVQHPNGNKEKNVPLPVIAELPPKVSVFVPPRDGFFGNPRKSKLICQATGFSPRQIQVSWLREGKQVGSGVTTDQVQAEAKESGPTTYKVTSTLTIKESDWLGQSMFTCRVDHRGLTFQQNASSMCVPDQDTAIRVFAIPPSFASIFLTKSTKLTCLVTDLTTYDSVTISWTRQNGEAVKTHTNISESHPNATFSAVGEASICEDDWNSGERFTCTVTHTDLASSLKQTISRPKGVALHRPDVYLLPPAREQLNLRESATITCLVTGFSPADVFVQWMQRGQPLSPEKYVTSAPMPEPQAPGRYFAHSILTVSEEEWNTGETYTCVVAHEALPNRVTERTVDKSTGKPTLYNVSLVMSDTAGTCY

SEQ ID NO: 74 - protein, 353 aa, synthetic construct
ASPTSPKVFPLSLCSTQPDGNVVIACLVQGFFPQEPLSVTWSESGQGVTARNFPPSQDASGDLYTTSSQLTLPATQCLAGKSVTCHVKHYTNPSQDVTVPCPVPSTPPTPSPSTPPTPSPSCCHPRLSLHRPALEDLLLGSEANLTCTLTGLRDASGVTFTWTPSSGKSAVQGPPERDLCGCYSVSSVLPGCAEPWNHGKTFTCTAAYPESKTPLTATLSKSGNTFRPEVHLLPPPSEELALNELVTLTCLARGFSPKDVLVRWLQGSQELPREKYLTWASRQEPSQGTTTFAVTSILRVAAEDWKKGDTFSCMVGHEALPLAFTQKTIDRLAGKPTHVNVSVVMAEVDGTCY

SEQ ID NO: 75 - protein, 340 aa, synthetic construct
ASPTSPKVFPLSLDSTPQDGNVVVACLVQGFFPQEPLSVTWSESGQNVTARNFPPSQDASGDLYTTSSQLTLPATQCPDGKSVTCHVKHYTNSSQDVTVPCRVPPPPPCCHPRLSLHRPALEDLLLGSEANLTCTLTGLRDASGATFTWTPSSGKSAVQGPPERDLCGCYSVSSVLPGCAQPWNHGETFTCTAAHPELKTPLTANITKSGNTFRPEVHLLPPPSEELALNELVTLTCLARGFSPKDVLVRWLQGSQELPREKYLTWASRQEPSQGTTTYAVTSILRVAAEDWKKGETFSCMVGHEALPLAFTQKTIDRMAGKPTHINVSVVMAEADGTCY

SEQ ID NO: 76 - protein, 159 aa, synthetic construct
MKNHLLFWGVLAVFIKAVHVKAQEDERIVLVDNKCKCARITSRIIRSSEDPNEDIVERNIRIIVPLNNRENISDPTSPLRTRFVYHLSDLCKKCDPTEVELDNQIVTATQSNICDEDSATETCYTYDRNKCYTAVVPLVYGGETKMVETALTPDACYPD

SEQ ID NO: 77-79 - skipped (3 entries)

SEQ ID NO: 80 - protein, 246 aa, synthetic construct
QVQLVQSGAEVKKPGSSVKVSCKASGTDFKLTYIHWVRQAPGQGLEWMGRVSPGSGNTKYNEKFKGRVTITADTSTSTAYMELSSLRSEDTAVYYCAGSYYSYDVLDYWGQGTTVTVSSGGGGSGGGGSGGGGSGGGGSDIQMTQSPSFLSASVGDRVTITCKASQNVEDRVAWYQQKPGKAPKALIYSSSHRYKGVPSRFSGSGSGTEFTLTISSLQPEDFATYFCQQFKSYPLTFGQGTKLEIK

SEQ ID NO: 81 - protein, 107 aa, synthetic construct
DIQMTQSPSFLSASVGDRVTITCKASQNVEDRVAWYQQKPGKAPKALIYSSSHRYKGVPSRFSGSGSGTEFTLTISSLQPEDFATYFCQQFKSYPLTFGQGTKLEIK

SEQ ID NO: 82 - protein, 119 aa, synthetic construct
QVQLVQSGAEVKKPGSSVKVSCKASGTDFKLTYIHWVRQAPGQGLEWMGRVSPGSGNTKYNEKFKGRVTITADTSTSTAYMELSSLRSEDTAVYYCAGSYYSYDVLDYWGQGTTVTVSS

SEQ ID NO: 83 - protein, 246 aa, synthetic construct
QVQLVQSGAEVKKPGSSVKVSCKASGTDFDKIYIHWVRQAPGQGLEWMGRISAGSGNVKYNEKFKGRVTITADTSTSTAYMELSSLRSEDTAVYYCAGSYYSYDVLDYWGQGTTVTVSSGGGGSGGGGSGGGGSGGGGSDIQMTQSPSFLSASVGDRVTITCKASQNVEDRVAWYQQKPGKAPKALIYSSSHRYKGVPSRFSGSGSGTEFTLTISSLQPEDFATYFCQQFKSYPLTFGQGTKLEIK

SEQ ID NO: 84 - protein, 107 aa, synthetic construct; identical to SEQ ID NO: 81

SEQ ID NO: 85 - protein, 119 aa, synthetic construct
QVQLVQSGAEVKKPGSSVKVSCKASGTDFDKIYIHWVRQAPGQGLEWMGRISAGSGNVKYNEKFKGRVTITADTSTSTAYMELSSLRSEDTAVYYCAGSYYSYDVLDYWGQGTTVTVSS

SEQ ID NO: 86 - protein, 10 aa, synthetic construct
QFWDSTNSAV

SEQ ID NO: 87 - protein, 107 aa, synthetic construct
DIQMTQSPSFLSASVGDRVTITCKASQNVDDRVAWYQQKPGKAPKALIYSSSHRYKGVPSRFSGSGSGTEFTLTISSLQPEDFATYFCQQFKSYPLTFGQGTKLEIK

SEQ ID NO: 88 - protein, 119 aa, synthetic construct
QVQLVQSGAEVKKPGSSVKVSCKASGHDFRDFYIHWVRQAPGQGLEWMGRVYPGSGSYRYNEKFKGRVTITADTSTSTAYMELSSLRSEDTAVYYCAGSYYSYDVLDYWGQGTTVTVSS

SEQ ID NO: 89 - protein, 246 aa, synthetic construct
QVQLVQSGAEVKKPGSSVKVSCKASGHDFKLTYIHWVRQAPGQGLEWMGRISAGSGNVKYNEKFKGRVTITADTSTSTAYMELSSLRSEDTAVYYCAGSYYSYDVLDYWGQGTTVTVSSGGGGSGGGGSGGGGSGGGGSDIQMTQSPSFLSASVGDRVTITCKASQNVDNRVAWYQQKPGKAPKALIYSSSHRYKGVPSRFSGSGSGTEFTLTISSLQPEDFATYFCQQFKSYPLTFGQGTKLEIK

SEQ ID NO: 90 - protein, 107 aa, synthetic construct
DIQMTQSPSFLSASVGDRVTITCKASQNVDNRVAWYQQKPGKAPKALIYSSSHRYKGVPSRFSGSGSGTEFTLTISSLQPEDFATYFCQQFKSYPLTFGQGTKLEIK

SEQ ID NO: 91 - protein, 119 aa, synthetic construct
QVQLVQSGAEVKKPGSSVKVSCKASGHDFKLTYIHWVRQAPGQGLEWMGRISAGSGNVKYNEKFKGRVTITADTSTSTAYMELSSLRSEDTAVYYCAGSYYSYDVLDYWGQGTTVTVSS

SEQ ID NO: 92 - protein, 246 aa, synthetic construct
QVQLVQSGAEVKKPGSSVKVSCKASGTDFKLTYIHWVRQAPGQGLEWMGRIFPGSGNVKYNEKFKGRVTITADTSTSTAYMELSSLRSEDTAVYYCAGSYYSYDVLDYWGQGTTVTVSSGGGGSGGGGSGGGGSGGGGSDIQMTQSPSFLSASVGDRVTITCKASQNVENKVAWHQQKPGKAPKALIYSSSHRYKGVPSRFSGSGSGTEFTLTISSLQPEDFATYFCQQFKSYPLTFGQGTKLEIK

SEQ ID NO: 93 - protein, 107 aa, synthetic construct
DIQMTQSPSFLSASVGDRVTITCKASQNVENKVAWHQQKPGKAPKALIYSSSHRYKGVPSRFSGSGSGTEFTLTISSLQPEDFATYFCQQFKSYPLTFGQGTKLEIK

SEQ ID NO: 94 - protein, 119 aa, synthetic construct
QVQLVQSGAEVKKPGSSVKVSCKASGTDFKLTYIHWVRQAPGQGLEWMGRIFPGSGNVKYNEKFKGRVTITADTSTSTAYMELSSLRSEDTAVYYCAGSYYSYDVLDYWGQGTTVTVSS

SEQ ID NO: 95 - protein, 246 aa, synthetic construct
QVQLVQSGAEVKKPGSSVKVSCKASGTDFDKIYIHWVRQAPGQGLEWMGRIFAGSGNTKYNEKFKGRVTITADTSTSTAYMELSSLRSEDTAVYYCAGSYYSYDVLDYWGQGTTVTVSSGGGGSGGGGSGGGGSGGGGSDIQMTQSPSFLSASVGDRVTITCKASQNVDDRVAWYQQKPGKAPKALIYSSSHRYKGVPSRFSGSGSGTEFTLTISSLQPEDFATYFCQQFKSYPLTFGQGTKLEIK

SEQ ID NO: 96 - protein, 107 aa, synthetic construct; identical to SEQ ID NO: 87

SEQ ID NO: 97 - protein, 119 aa, synthetic construct
QVQLVQSGAEVKKPGSSVKVSCKASGTDFDKIYIHWVRQAPGQGLEWMGRIFAGSGNTKYNEKFKGRVTITADTSTSTAYMELSSLRSEDTAVYYCAGSYYSYDVLDYWGQGTTVTVSS

SEQ ID NO: 98 - protein, 246 aa, synthetic construct
QVQLVQSGAEVKKPGSSVKVSCKASGHDFDKFYIHWVRQAPGQGLEWMGRVSAGSGNVKYNEKFKGRVTITADTSTSTAYMELSSLRSEDTAVYYCAGSYYSYDVLDYWGQGTTVTVSSGGGGSGGGGSGGGGSGGGGSDIQMTQSPSFLSASVGDRVTITCKASQNVGNRVAWYQQKPGKAPKALIYSSSHRYSGVPSRFSGSGSGTEFTLTISSLQPEDFATYFCQQFKSYPLTFGQGTKLEIK

SEQ ID NO: 99 - protein, 107 aa, synthetic construct
DIQMTQSPSFLSASVGDRVTITCKASQNVGNRVAWYQQKPGKAPKALIYSSSHRYSGVPSRFSGSGSGTEFTLTISSLQPEDFATYFCQQFKSYPLTFGQGTKLEIK

SEQ ID NO: 100 - protein, 119 aa, synthetic construct
QVQLVQSGAEVKKPGSSVKVSCKASGHDFDKFYIHWVRQAPGQGLEWMGRVSAGSGNVKYNEKFKGRVTITADTSTSTAYMELSSLRSEDTAVYYCAGSYYSYDVLDYWGQGTTVTVSS

SEQ ID NO: 101 - protein, 246 aa, synthetic construct
QVQLVQSGAEVKKPGSSVKVSCKASGHDFDKFYIHWVRQAPGQGLEWMGRIFAGSGNVKYNEKFKGRVTITADTSTSTAYMELSSLRSEDTAVYYCAGSYYSYDVLDYWGQGTTVTVSSGGGGSGGGGSGGGGSGGGGSDIQMTQSPSFLSASVGDRVTITCKASQNVGDRVAWYQQKPGKAPKALIYSSSHRYKGVPSRFSGSGSGTEFTLTISSLQPEDFATYFCQQFKSYPLTFGQGTKLEIK

SEQ ID NO: 102 - protein, 107 aa, synthetic construct
DIQMTQSPSFLSASVGDRVTITCKASQNVGDRVAWYQQKPGKAPKALIYSSSHRYKGVPSRFSGSGSGTEFTLTISSLQPEDFATYFCQQFKSYPLTFGQGTKLEIK

SEQ ID NO: 103 - protein, 119 aa, synthetic construct
QVQLVQSGAEVKKPGSSVKVSCKASGHDFDKFYIHWVRQAPGQGLEWMGRIFAGSGNVKYNEKFKGRVTITADTSTSTAYMELSSLRSEDTAVYYCAGSYYSYDVLDYWGQGTTVTVSS

SEQ ID NO: 104 - protein, 246 aa, synthetic construct
QVQLVQSGAEVKKPGSSVKVSCKASGTDFKLTYIHWVRQAPGQGLEWMGRVSPGSGNVKYNEKFKGRVTITADTSTSTAYMELSSLRSEDTAVYYCAGSYYSYDVLDYWGQGTTVTVSSGGGGSGGGGSGGGGSGGGGSDIQMTQSPSFLSASVGDRVTITCKASQNVGDRVAWYQQKPGKAPKALIYSSSHRYKGVPSRFSGSGSGTEFTLTISSLQPEDFATYFCQQFKSYPLTFGQGTKLEIK

SEQ ID NO: 105 - protein, 107 aa, synthetic construct; identical to SEQ ID NO: 102

SEQ ID NO: 106 - protein, 119 aa, synthetic construct
QVQLVQSGAEVKKPGSSVKVSCKASGTDFKLTYIHWVRQAPGQGLEWMGRVSPGSGNVKYNEKFKGRVTITADTSTSTAYMELSSLRSEDTAVYYCAGSYYSYDVLDYWGQGTTVTVSS

SEQ ID NO: 107 - protein, 246 aa, synthetic construct
QVQLVQSGAEVKKPGSSVKVSCKASGTDFDKIYIHWVRQAPGQGLEWMGRVSAGSGNTKYNEKFKGRVTITADTSTSTAYMELSSLRSEDTAVYYCAGSYYSYDVLDYWGQGTTVTVSSGGGGSGGGGSGGGGSGGGGSDIQMTQSPSFLSASVGDRVTITCKASQNVGNRVAWYQQKPGKAPKALIYSSSHRYKGVPSRFSGSGSGTEFTLTISSLQPEDFATYFCQQFKSYPLTFGQGTKLEIK

SEQ ID NO: 108 - protein, 107 aa, synthetic construct
DIQMTQSPSFLSASVGDRVTITCKASQNVGNRVAWYQQKPGKAPKALIYSSSHRYKGVPSRFSGSGSGTEFTLTISSLQPEDFATYFCQQFKSYPLTFGQGTKLEIK

SEQ ID NO: 109 - protein, 119 aa, synthetic construct
QVQLVQSGAEVKKPGSSVKVSCKASGTDFDKIYIHWVRQAPGQGLEWMGRVSAGSGNTKYNEKFKGRVTITADTSTSTAYMELSSLRSEDTAVYYCAGSYYSYDVLDYWGQGTTVTVSS

SEQ ID NO: 110 - protein, 246 aa, synthetic construct
QVQLVQSGAEVKKPGSSVKVSCKASGTDFKLTYIHWVRQAPGQGLEWMGRIFPGSGNVKYNEKFKGRVTITADTSTSTAYMELSSLRSEDTAVYYCAGSYYSYDVLDYWGQGTTVTVSSGGGGSGGGGSGGGGSGGGGSDIQMTQSPSFLSASVGDRVTITCKASQNVDNRVAWYQQKPGKAPKALIYSSSHRYKGVPSRFSGSGSGTEFTLTISSLQPEDFATYFCQQFKSYPLTFGQGTKLEIK

SEQ ID NO: 111 - protein, 107 aa, synthetic construct; identical to SEQ ID NO: 90

SEQ ID NO: 112 - protein, 119 aa, synthetic construct; identical to SEQ ID NO: 94

SEQ ID NO: 113 - protein, 246 aa, synthetic construct
QVQLVQSGAEVKKPGSSVKVSCKASGTDFDKIYIHWVRQAPGQGLEWMGRISAGSGNTKYNEKFKGRVTITADTSTSTAYMELSSLRSEDTAVYYCAGSYYSYDVLDYWGQGTTVTVSSGGGGSGGGGSGGGGSGGGGSDIQMTQSPSFLSASVGDRVTITCKASQNVDDRVAWYQQKPGKAPKALIYSSSHRYKGVPSRFSGSGSGTEFTLTISSLQPEDFATYFCQQFKSYPLTFGQGTKLEIK

SEQ ID NO: 114 - protein, 107 aa, synthetic construct; identical to SEQ ID NO: 87

SEQ ID NO: 115 - protein, 119 aa, synthetic construct
QVQLVQSGAEVKKPGSSVKVSCKASGTDFDKIYIHWVRQAPGQGLEWMGRISAGSGNTKYNEKFKGRVTITADTSTSTAYMELSSLRSEDTAVYYCAGSYYSYDVLDYWGQGTTVTVSS

SEQ ID NO: 116 - protein, 246 aa, synthetic construct
QVQLVQSGAEVKKPGSSVKVSCKASGTDFRLTYIHWVRQAPGQGLEWMGRVSPGSGNTKYNEKFKGRVTITADTSTSTAYMELSSLRSEDTAVYYCAGSYYSYDVLDYWGQGTTVTVSSGGGGSGGGGSGGGGSGGGGSDIQMTQSPSFLSASVGDRVTITCKASQNVDNKVAWHQQKPGKAPKALIYSSSHRYKGVPSRFSGSGSGTEFTLTISSLQPEDFATYFCQQFKSYPLTFGQGTKLEIK

SEQ ID NO: 117 - protein, 107 aa, synthetic construct
DIQMTQSPSFLSASVGDRVTITCKASQNVDNKVAWHQQKPGKAPKALIYSSSHRYKGVPSRFSGSGSGTEFTLTISSLQPEDFATYFCQQFKSYPLTFGQGTKLEIK

SEQ ID NO: 118 - protein, 119 aa, synthetic construct
QVQLVQSGAEVKKPGSSVKVSCKASGTDFRLTYIHWVRQAPGQGLEWMGRVSPGSGNTKYNEKFKGRVTITADTSTSTAYMELSSLRSEDTAVYYCAGSYYSYDVLDYWGQGTTVTVSS

SEQ ID NO: 119 - protein, 246 aa, synthetic construct
QVQLVQSGAEVKKPGSSVKVSCKASGGTFRLTYIHWVRQAPGQGLEWMGRVYPGSGNTKYNEKFKGRVTITADTSTSTAYMELSSLRSEDTAVYYCAGSYYSYDVLDYWGQGTTVTVSSGGGGSGGGGSGGGGSGGGGSDIQMTQSPSFLSASVGDRVTITCKASQNVDDRVAWYQQKPGKAPKALIYSSSHRYKGVPSRFSGSGSGTEFTLTISSLQPEDFATYFCQQFKSYPLTFGQGTKLEIK

SEQ ID NO: 120 - protein, 107 aa, synthetic construct; identical to SEQ ID NO: 87

SEQ ID NO: 121 - protein, 119 aa, synthetic construct
QVQLVQSGAEVKKPGSSVKVSCKASGGTFRLTYIHWVRQAPGQGLEWMGRVYPGSGNTKYNEKFKGRVTITADTSTSTAYMELSSLRSEDTAVYYCAGSYYSYDVLDYWGQGTTVTVSS

SEQ ID NO: 122 - protein, 246 aa, synthetic construct
QVQLVQSGAEVKKPGSSVKVSCKASGTDFRLTYIHWVRQAPGQGLEWMGRIFPGSGNTKYNEKFKGRVTITADTSTSTAYMELSSLRSEDTAVYYCAGSYYSYDVLDYWGQGTTVTVSSGGGGSGGGGSGGGGSGGGGSDIQMTQSPSFLSASVGDRVTITCKASQNVDDRVAWYQQKPGKAPKALIYSSSHRYKGVPSRFSGSGSGTEFTLTISSLQPEDFATYFCQQFKSYPLTFGQGTKLEIK

SEQ ID NO: 123 - protein, 107 aa, synthetic construct; identical to SEQ ID NO: 87

SEQ ID NO: 124 - protein, 119 aa, synthetic construct
QVQLVQSGAEVKKPGSSVKVSCKASGTDFRLTYIHWVRQAPGQGLEWMGRIFPGSGNTKYNEKFKGRVTITADTSTSTAYMELSSLRSEDTAVYYCAGSYYSYDVLDYWGQGTTVTVSS

SEQ ID NO: 125 - protein, 246 aa, synthetic construct
QVQLVQSGAEVKKPGSSVKVSCKASGTDFKLTYIHWVRQAPGQGLEWMGRIFPGSGNVKYNEKFKGRVTITADTSTSTAYMELSSLRSEDTAVYYCAGSYYSYDVLDYWGQGTTVTVSSGGGGSGGGGSGGGGSGGGGSDIQMTQSPSFLSASVGDRVTITCKASQNVEDRVAWYQQKPGKAPKALIYSSSHRYKGVPSRFSGSGSGTEFTLTISSLQPEDFATYFCQQFKSYPLTFGQGTKLEIK

SEQ ID NO: 126 - protein, 107 aa, synthetic construct; identical to SEQ ID NO: 81

SEQ ID NO: 127 - protein, 119 aa, synthetic construct; identical to SEQ ID NO: 94

SEQ ID NO: 128 - protein, 246 aa, synthetic construct
QVQLVQSGAEVKKPGSSVKVSCKASGGTFRLTYIHWVRQAPGQGLEWMGRISAGSGNVKYNEKFKGRVTITADTSTSTAYMELSSLRSEDTAVYYCAGSYYSYDVLDYWGQGTTVTVSSGGGGSGGGGSGGGGSGGGGSDIQMTQSPSFLSASVGDRVTITCKASQNVGDRVAWYQQKPGKAPKALIYSSSHRYKGVPSRFSGSGSGTEFTLTISSLQPEDFATYFCQQFKSYPLTFGQGTKLEIK

SEQ ID NO: 129 - protein, 107 aa, synthetic construct; identical to SEQ ID NO: 102

SEQ ID NO: 130 - protein, 119 aa, synthetic construct
QVQLVQSGAEVKKPGSSVKVSCKASGGTFRLTYIHWVRQAPGQGLEWMGRISAGSGNVKYNEKFKGRVTITADTSTSTAYMELSSLRSEDTAVYYCAGSYYSYDVLDYWGQGTTVTVSS

SEQ ID NO: 131 - protein, 246 aa, synthetic construct
QVQLVQSGAEVKKPGSSVKVSCKASGGTFDKTYIHWVRQAPGQGLEWMGRISAGSGNTKYNEKFKGRVTITADTSTSTAYMELSSLRSEDTAVYYCAGSYYSYDVLDYWGQGTTVTVSSGGGGSGGGGSGGGGSGGGGSDIQMTQSPSFLSASVGDRVTITCKASQNVDDRVAWYQQKPGKAPKALIYSSSHRYKGVPSRFSGSGSGTEFTLTISSLQPEDFATYFCQQFKSYPLTFGQGTKLEIK

SEQ ID NO: 132 - protein, 107 aa, synthetic construct; identical to SEQ ID NO: 87

SEQ ID NO: 133 - protein, 119 aa, synthetic construct
QVQLVQSGAEVKKPGSSVKVSCKASGGTFDKTYIHWVRQAPGQGLEWMGRISAGSGNTKYNEKFKGRVTITADTSTSTAYMELSSLRSEDTAVYYCAGSYYSYDVLDYWGQGTTVTVSS

SEQ ID NO: 134 - protein, 246 aa, synthetic construct
QVQLVQSGAEVKKPGSSVKVSCKASGHDFDKFYIHWVRQAPGQGLEWMGRISAGSGNTKYNEKFKGRVTITADTSTSTAYMELSSLRSEDTAVYYCAGSYYSYDVLDYWGQGTTVTVSSGGGGSGGGGSGGGGSGGGGSDIQMTQSPSFLSASVGDRVTITCKASQNVDDRVAWYQQKPGKAPKALIYSSSHRYKGVPSRFSGSGSGTEFTLTISSLQPEDFATYFCQQFKSYPLTFGQGTKLEIK

SEQ ID NO: 135 - protein, 107 aa, synthetic construct; identical to SEQ ID NO: 87

SEQ ID NO: 136 - protein, 119 aa, synthetic construct
QVQLVQSGAEVKKPGSSVKVSCKASGHDFDKFYIHWVRQAPGQGLEWMGRISAGSGNTKYNEKFKGRVTITADTSTSTAYMELSSLRSEDTAVYYCAGSYYSYDVLDYWGQGTTVTVSS

SEQ ID NO: 137 - protein, 246 aa, synthetic construct
QVQLVQSGAEVKKPGSSVKVSCKASGTDFKLTYIHWVRQAPGQGLEWMGRISAGSGNVKYNEKFKGRVTITADTSTSTAYMELSSLRSEDTAVYYCAGSYYSYDVLDYWGQGTTVTVSSGGGGSGGGGSGGGGSGGGGSDIQMTQSPSFLSASVGDRVTITCKASQNVDNKVAWHQQKPGKAPKALIYSSSHRYKGVPSRFSGSGSGTEFTLTISSLQPEDFATYFCQQFKSYPLTFGQGTKLEIK

SEQ ID NO: 138 - protein, 107 aa, synthetic construct; identical to SEQ ID NO: 117

SEQ ID NO: 139 - protein, 119 aa, synthetic construct
QVQLVQSGAEVKKPGSSVKVSCKASGTDFKLTYIHWVRQAPGQGLEWMGRISAGSGNVKYNEKFKGRVTITADTSTSTAYMELSSLRSEDTAVYYCAGSYYSYDVLDYWGQGTTVTVSS

SEQ ID NO: 140 - protein, 246 aa, synthetic construct
QVQLVQSGAEVKKPGSSVKVSCKASGHDFRLTYIHWVRQAPGQGLEWMGRISAGSGNVKYNEKFKGRVTITADTSTSTAYMELSSLRSEDTAVYYCAGSYYSYDVLDYWGQGTTVTVSSGGGGSGGGGSGGGGSGGGGSDIQMTQSPSFLSASVGDRVTITCKASQNVADRVAWYQQKPGKAPKALIYSSSHRYKGVPSRFSGSGSGTEFTLTISSLQPEDFATYFCQQFKSYPLTFGQGTKLEIK

SEQ ID NO: 141 - protein, 107 aa, synthetic construct
DIQMTQSPSFLSASVGDRVTITCKASQNVADRVAWYQQKPGKAPKALIYSSSHRYKGVPSRFSGSGSGTEFTLTISSLQPEDFATYFCQQFKSYPLTFGQGTKLEIK

SEQ ID NO: 142 - protein, 119 aa, synthetic construct
QVQLVQSGAEVKKPGSSVKVSCKASGHDFRLTYIHWVRQAPGQGLEWMGRISAGSGNVKYNEKFKGRVTITADTSTSTAYMELSSLRSEDTAVYYCAGSYYSYDVLDYWGQGTTVTVSS

SEQ ID NO: 143 - protein, 246 aa, synthetic construct
QVQLVQSGAEVKKPGSSVKVSCKASGHDFHLWYIHWVRQAPGQGLEWMGRVSAGSGNVKYNEKFKGRVTITADTSTSTAYMELSSLRSEDTAVYYCAGSYYSYDVLDYWGQGTTVTVSSGGGGSGGGGSGGGGSGGGGSDIQMTQSPSFLSASVGDRVTITCKASQNVDNKVAWHQQKPGKAPKALIYSSSHRYKGVPSRFSGSGSGTEFTLTISSLQPEDFATYFCQQFKSYPLTFGQGTKLEIK

SEQ ID NO: 144 - protein, 107 aa, synthetic construct; identical to SEQ ID NO: 117

SEQ ID NO: 145 - protein, 119 aa, synthetic construct
QVQLVQSGAEVKKPGSSVKVSCKASGHDFHLWYIHWVRQAPGQGLEWMGRVSAGSGNVKYNEKFKGRVTITADTSTSTAYMELSSLRSEDTAVYYCAGSYYSYDVLDYWGQGTTVTVSS

SEQ ID NO: 146 - protein, 246 aa, synthetic construct
QVQLVQSGAEVKKPGSSVKVSCKASGHDFHLWYIHWVRQAPGQGLEWMGRVFAGSGNTKYNEKFKGRVTITADTSTSTAYMELSSLRSEDTAVYYCAGSYYSYDVLDYWGQGTTVTVSSGGGGSGGGGSGGGGSGGGGSDIQMTQSPSFLSASVGDRVTITCKASQNVEDKVAWYQQKPGKAPKALIYSSSHRYKGVPSRFSGSGSGTEFTLTISSLQPEDFATYFCQQFKSYPLTFGQGTKLEIK

SEQ ID NO: 147 - protein, 107 aa, synthetic construct
DIQMTQSPSFLSASVGDRVTITCKASQNVEDKVAWYQQKPGKAPKALIYSSSHRYKGVPSRFSGSGSGTEFTLTISSLQPEDFATYFCQQFKSYPLTFGQGTKLEIK

SEQ ID NO: 148 - protein, 119 aa, synthetic construct
QVQLVQSGAEVKKPGSSVKVSCKASGHDFHLWYIHWVRQAPGQGLEWMGRVFAGSGNTKYNEKFKGRVTITADTSTSTAYMELSSLRSEDTAVYYCAGSYYSYDVLDYWGQGTTVTVSS

SEQ ID NO: 149 - protein, 246 aa, synthetic construct
QVQLVQSGAEVKKPGSSVKVSCKASGTDFKLTYIHWVRQAPGQGLEWMGRIFPGSGNTKYNEKFKGRVTITADTSTSTAYMELSSLRSEDTAVYYCAGSYYSYDVLDYWGQGTTVTVSSGGGGSGGGGSGGGGSGGGGSDIQMTQSPSFLSASVGDRVTITCKASQNVDDRVAWYQQKPGKAPKALIYSSSHRYKGVPSRFSGSGSGTEFTLTISSLQPEDFATYFCQQFKSYPLTFGQGTKLEIK

SEQ ID NO: 150 - protein, 107 aa, synthetic construct; identical to SEQ ID NO: 87

SEQ ID NO: 151 - protein, 119 aa, synthetic construct
QVQLVQSGAEVKKPGSSVKVSCKASGTDFKLTYIHWVRQAPGQGLEWMGRIFPGSGNTKYNEKFKGRVTITADTSTSTAYMELSSLRSEDTAVYYCAGSYYSYDVLDYWGQGTTVTVSS

SEQ ID NO: 152 - skipped

SEQ ID NO: 153 - protein, 246 aa, synthetic construct
QVQLVQSGAEVKKPGSSVKVSCKASGTDFKLTYIHWVRQAPGQGLEWMGRVSAGSGNVKYNEKFKGRVTITADTSTSTAYMELSSLRSEDTAVYYCAGSYYSYDVLDYWGQGTTVTVSSGGGGSGGGGSGGGGSGGGGSDIQMTQSPSFLSASVGDRVTITCKASQNVGNRVAWYQQKPGKAPKALIYSSSHRYKGVPSRFSGSGSGTEFTLTISSLQPEDFATYFCQQFKSYPLTFGQGTKLEIK

SEQ ID NO: 154 - protein, 107 aa, synthetic construct; identical to SEQ ID NO: 108

SEQ ID NO: 155 - protein, 119 aa, synthetic construct
QVQLVQSGAEVKKPGSSVKVSCKASGTDFKLTYIHWVRQAPGQGLEWMGRVSAGSGNVKYNEKFKGRVTITADTSTSTAYMELSSLRSEDTAVYYCAGSYYSYDVLDYWGQGTTVTVSS

SEQ ID NO: 156 - protein, 246 aa, synthetic construct
QVQLVQSGAEVKKPGSSVKVSCKASGTDFKLTYIHWVRQAPGQGLEWMGRISPGSGNTKYNEKFKGRVTITADTSTSTAYMELSSLRSEDTAVYYCAGSYYSYDVLDYWGQGTTVTVSSGGGGSGGGGSGGGGSGGGGSDIQMTQSPSFLSASVGDRVTITCKASQNVGDRVAWYQQKPGKAPKALIYSSSHRYKGVPSRFSGSGSGTEFTLTISSLQPEDFATYFCQQFKSYPLTFGQGTKLEIK

SEQ ID NO: 157 - protein, 107 aa, synthetic construct; identical to SEQ ID NO: 102

SEQ ID NO: 158 - protein, 119 aa, synthetic construct
QVQLVQSGAEVKKPGSSVKVSCKASGTDFKLTYIHWVRQAPGQGLEWMGRISPGSGNTKYNEKFKGRVTITADTSTSTAYMELSSLRSEDTAVYYCAGSYYSYDVLDYWGQGTTVTVSS

SEQ ID NO: 159 - protein, 246 aa, synthetic construct
QVQLVQSGAEVKKPGSSVKVSCKASGHDFHLWYIHWVRQAPGQGLEWMGRISPGSGNVKYNEKFKGRVTITADTSTSTAYMELSSLRSEDTAVYYCAGSYYSYDVLDYWGQGTTVTVSSGGGGSGGGGSGGGGSGGGGSDIQMTQSPSFLSASVGDRVTITCKASQNVGDRVAWHQQKPGKAPKALIYSSSHRYKGVPSRFSGSGSGTEFTLTISSLQPEDFATYFCQQFKSYPLTFGQGTKLEIK

SEQ ID NO: 160 - protein, 107 aa, synthetic construct
DIQMTQSPSFLSASVGDRVTITCKASQNVGDRVAWHQQKPGKAPKALIYSSSHRYKGVPSRFSGSGSGTEFTLTISSLQPEDFATYFCQQFKSYPLTFGQGTKLEIK

SEQ ID NO: 161 - protein, 119 aa, synthetic construct
QVQLVQSGAEVKKPGSSVKVSCKASGHDFHLWYIHWVRQAPGQGLEWMGRISPGSGNVKYNEKFKGRVTITADTSTSTAYMELSSLRSEDTAVYYCAGSYYSYDVLDYWGQGTTVTVSS

SEQ ID NO: 162 - protein, 246 aa, synthetic construct
QVQLVQSGAEVKKPGSSVKVSCKASGHDFKLTYIHWVRQAPGQGLEWMGRISAGSGNVKYNEKFKGRVTITADTSTSTAYMELSSLRSEDTAVYYCAGSYYSYDVLDYWGQGTTVTVSSGGGGSGGGGSGGGGSGGGGSDIQMTQSPSFLSASVGDRVTITCKASQNVDDRVAWYQQKPGKAPKALIYSSSHRYKGVPSRFSGSGSGTEFTLTISSLQPEDFATYFCQQFKSYPLTFGQGTKLEIK

SEQ ID NO: 163 - protein, 107 aa, synthetic construct; identical to SEQ ID NO: 87

SEQ ID NO: 164 - protein, 119 aa, synthetic construct; identical to SEQ ID NO: 91

SEQ ID NO: 165 - protein, 246 aa, synthetic construct
QVQLVQSGAEVKKPGSSVKVSCKASGTDFHLWYIHWVRQAPGQGLEWMGRVFAGSGSYRYNEKFKGRVTITADTSTSTAYMELSSLRSEDTAVYYCAGSYYSYDVLDYWGQGTTVTVSSGGGGSGGGGSGGGGSGGGGSDIQMTQSPSFLSASVGDRVTITCKASQNVDDRVAWYQQKPGKAPKALIYSSSHRYKGVPSRFSGSGSGTEFTLTISSLQPEDFATYFCQQFKSYPLTFGQGTKLEIK

SEQ ID NO: 166 - protein, 107 aa, synthetic construct; identical to SEQ ID NO: 87

SEQ ID NO: 167 - protein, 119 aa, synthetic construct
QVQLVQSGAEVKKPGSSVKVSCKASGTDFHLWYIHWVRQAPGQGLEWMGRVFAGSGSYRYNEKFKGRVTITADTSTSTAYMELSSLRSEDTAVYYCAGSYYSYDVLDYWGQGTTVTVSS

SEQ ID NO: 168 - protein, 246 aa, synthetic construct
QVQLVQSGAEVKKPGSSVKVSCKASGTDFDKIYIHWVRQAPGQGLEWMGRISAGSGNTKYNEKFKGRVTITADTSTSTAYMELSSLRSEDTAVYYCAGSYYSYDVLDYWGQGTTVTVSSGGGGSGGGGSGGGGSGGGGSDIQMTQSPSFLSASVGDRVTITCKASQNVADRVAWYQQKPGKAPKALIYSSSHRYKGVPSRFSGSGSGTEFTLTISSLQPEDFATYFCQQFKSYPLTFGQGTKLEIK

SEQ ID NO: 169 - protein, 107 aa, synthetic construct; identical to SEQ ID NO: 141

SEQ ID NO: 170 - protein, 119 aa, synthetic construct; identical to SEQ ID NO: 115

SEQ ID NO: 171 - protein, 246 aa, synthetic construct
QVQLVQSGAEVKKPGSSVKVSCKASGTDFKLTYIHWVRQAPGQGLEWMGRISAGSGNTKYNEKFKGRVTITADTSTSTAYMELSSLRSEDTAVYYCAGSYYSYDVLDYWGQGTTVTVSSGGGGSGGGGSGGGGSGGGGSDIQMTQSPSFLSASVGDRVTITCKASQNVEDRVAWYQQKPGKAPKALIYSSSHRYKGVPSRFSGSGSGTEFTLTISSLQPEDFATYFCQQFKSYPLTFGQGTKLEIK

SEQ ID NO: 172 - protein, 107 aa, synthetic construct; identical to SEQ ID NO: 81

SEQ ID NO: 173 - protein, 119 aa, synthetic construct
QVQLVQSGAEVKKPGSSVKVSCKASGTDFKLTYIHWVRQAPGQGLEWMGRISAGSGNTKYNEKFKGRVTITADTSTSTAYMELSSLRSEDTAVYYCAGSYYSYDVLDYWGQGTTVTVSS

SEQ ID NO: 174 - protein, 246 aa, synthetic construct
QVQLVQSGAEVKKPGSSVKVSCKASGTDFRLTYIHWVRQAPGQGLEWMGRISPGSGNTKYNEKFKGRVTITADTSTSTAYMELSSLRSEDTAVYYCAGSYYSYDVLDYWGQGTTVTVSSGGGGSGGGGSGGGGSGGGGSDIQMTQSPSFLSASVGDRVTITCKASQNVGNRVAWYQQKPGKAPKALIYSSSHRYKGVPSRFSGSGSGTEFTLTISSLQPEDFATYFCQQFKSYPLTFGQGTKLEIK

SEQ ID NO: 175 - protein, 107 aa, synthetic construct; identical to SEQ ID NO: 108

SEQ ID NO: 176 - protein, 119 aa, synthetic construct
QVQLVQSGAEVKKPGSSVKVSCKASGTDFRLTYIHWVRQAPGQGLEWMGRISPGSGNTKYNEKFKGRVTITADTSTSTAYMELSSLRSEDTAVYYCAGSYYSYDVLDYWGQGTTVTVSS

SEQ ID NO: 177 - protein, 246 aa, synthetic construct
QVQLVQSGAEVKKPGSSVKVSCKASGHDFDKTYIHWVRQAPGQGLEWMGRVSAGSGNVKYNEKFKGRVTITADTSTSTAYMELSSLRSEDTAVYYCAGSYYSYDVLDYWGQGTTVTVSSGGGGSGGGGSGGGGSGGGGSDIQMTQSPSFLSASVGDRVTITCKASQNVEDRVAWYQQKPGKAPKALIYSSSHRYKGVPSRFSGSGSGTEFTLTISSLQPEDFATYFCQQFKSYPLTFGQGTKLEIK

SEQ ID NO: 178 - protein, 107 aa, synthetic construct; identical to SEQ ID NO: 81

SEQ ID NO: 179 - protein, 119 aa, synthetic construct
QVQLVQSGAEVKKPGSSVKVSCKASGHDFDKTYIHWVRQAPGQGLEWMGRVSAGSGNVKYNEKFKGRVTITADTSTSTAYMELSSLRSEDTAVYYCAGSYYSYDVLDYWGQGTTVTVSS

SEQ ID NO: 180 - protein, 246 aa, synthetic construct
QVQLVQSGAEVKKPGSSVKVSCKASGHDFKLTYIHWVRQAPGQGLEWMGRVSPGSGNTKYNEKFKGRVTITADTSTSTAYMELSSLRSEDTAVYYCAGSYYSYDVLDYWGQGTTVTVSSGGGGSGGGGSGGGGSGGGGSDIQMTQSPSFLSASVGDRVTITCKASQNVEDRVAWHQQKPGKAPKALIYSSSHRYKGVPSRFSGSGSGTEFTLTISSLQPEDFATYFCQQFKSYPLTFGQGTKLEIK

SEQ ID NO: 181 - protein, 107 aa, synthetic construct
DIQMTQSPSFLSASVGDRVTITCKASQNVEDRVAWHQQKPGKAPKALIYSSSHRYKGVPSRFSGSGSGTEFTLTISSLQPEDFATYFCQQFKSYPLTFGQGTKLEIK

SEQ ID NO: 182 - protein, 119 aa, synthetic construct
QVQLVQSGAEVKKPGSSVKVSCKASGHDFKLTYIHWVRQAPGQGLEWMGRVSPGSGNTKYNEKFKGRVTITADTSTSTAYMELSSLRSEDTAVYYCAGSYYSYDVLDYWGQGTTVTVSS

SEQ ID NO: 183 - protein, 246 aa, synthetic construct
QVQLVQSGAEVKKPGSSVKVSCKASGHDFDKTYIHWVRQAPGQGLEWMGRIYPGSGNVKYNEKFKGRVTITADTSTSTAYMELSSLRSEDTAVYYCAGSYYSYDVLDYWGQGTTVTVSSGGGGSGGGGSGGGGSGGGGSDIQMTQSPSFLSASVGDRVTITCKASQNVADRVAWYQQKPGKAPKALIYSSSHRYKGVPSRFSGSGSGTEFTLTISSLQPEDFATYFCQQFKSYPLTFGQGTKLEIK

SEQ ID NO: 184 - protein, 107 aa, synthetic construct; identical to SEQ ID NO: 141

SEQ ID NO: 185 - protein, 119 aa, synthetic construct
QVQLVQSGAEVKKPGSSVKVSCKASGHDFDKTYIHWVRQAPGQGLEWMGRIYPGSGNVKYNEKFKGRVTITADTSTSTAYMELSSLRSEDTAVYYCAGSYYSYDVLDYWGQGTTVTVSS

SEQ ID NO: 186 - protein, 246 aa, synthetic construct
QVQLVQSGAEVKKPGSSVKVSCKASGTDFDKTYIHWVRQAPGQGLEWMGRISAGSGNVKYNEKFKGRVTITADTSTSTAYMELSSLRSEDTAVYYCAGSYYSYDVLDYWGQGTTVTVSSGGGGSGGGGSGGGGSGGGGSDIQMTQSPSFLSASVGDRVTITCKASQNVDDRVAWYQQKPGKAPKALIYSSSHRYKGVPSRFSGSGSGTEFTLTISSLQPEDFATYFCQQFKSYPLTFGQGTKLEIK

SEQ ID NO: 187 - protein, 107 aa, synthetic construct; identical to SEQ ID NO: 87

SEQ ID NO: 188 - protein, 119 aa, synthetic construct
QVQLVQSGAEVKKPGSSVKVSCKASGTDFDKTYIHWVRQAPGQGLEWMGRISAGSGNVKYNEKFKGRVTITADTSTSTAYMELSSLRSEDTAVYYCAGSYYSYDVLDYWGQGTTVTVSS

SEQ ID NO: 189 - protein, 246 aa, synthetic construct
QVQLVQSGAEVKKPGSSVKVSCKASGTDFDKIYIHWVRQAPGQGLEWMGRISAGSGNIKYNEKFKGRVTITADTSTSTAYMELSSLRSEDTAVYYCAGSYYSYDVLDYWGQGTTVTVSSGGGGSGGGGSGGGGSGGGGSDIQMTQSPSFLSASVGDRVTITCKASQNVDDRVAWYQQKPGKAPKALIYSSSHRYKGVPSRFSGSGSGTEFTLTISSLQPEDFATYFCQQFKSYPLTFGQGTKLEIK

SEQ ID NO: 190 - protein, 107 aa, synthetic construct; identical to SEQ ID NO: 87

SEQ ID NO: 191 - protein, 119 aa, synthetic construct
QVQLVQSGAEVKKPGSSVKVSCKASGTDFDKIYIHWVRQAPGQGLEWMGRISAGSGNIKYNEKFKGRVTITADTSTSTAYMELSSLRSEDTAVYYCAGSYYSYDVLDYWGQGTTVTVSS

SEQ ID NO: 192 - protein, 246 aa, synthetic construct
QVQLVQSGAEVKKPGSSVKVSCKASGTDFDKIYIHWVRQAPGQGLEWMGRISAGSGNVKYNEKFKGRVTITADTSTSTAYMELSSLRSEDTAVYYCAGSYYSYDVLDYWGQGTTVTVSSGGGGSGGGGSGGGGSGGGGSDIQMTQSPSFLSASVGDRVTITCKASQNVGDRVAWYQQKPGKAPKALIYSSSHRYKGVPSRFSGSGSGTEFTLTISSLQPEDFATYFCQQFKSYPLTFGQGTKLEIK

SEQ ID NO: 193 - protein, 107 aa, synthetic construct; identical to SEQ ID NO: 102

SEQ ID NO: 194 - protein, 119 aa, synthetic construct; identical to SEQ ID NO: 85

SEQ ID NO: 195 - protein, 246 aa, synthetic construct
QVQLVQSGAEVKKPGSSVKVSCKASGGTFKLTYIHWVRQAPGQGLEWMGRVSAGSGNVKYNEKFKGRVTITADTSTSTAYMELSSLRSEDTAVYYCAGSYYSYDVLDYWGQGTTVTVSSGGGGSGGGGSGGGGSGGGGSDIQMTQSPSFLSASVGDRVTITCKASQNVDDRVAWYQQKPGKAPKALIYSSSHRYKGVPSRFSGSGSGTEFTLTISSLQPEDFATYFCQQFKSYPLTFGQGTKLEIK

SEQ ID NO: 196 - protein, 107 aa, synthetic construct; identical to SEQ ID NO: 87

SEQ ID NO: 197 - protein, 119 aa, synthetic construct
QVQLVQSGAEVKKPGSSVKVSCKASGGTFKLTYIHWVRQAPGQGLEWMGRVSAGSGNVKYNEKFKGRVTITADTSTSTAYMELSSLRSEDTAVYYCAGSYYSYDVLDYWGQGTTVTVSS

SEQ ID NO: 198 - protein, 246 aa, synthetic construct
QVQLVQSGAEVKKPGSSVKVSCKASGTDFKLTYIHWVRQAPGQGLEWMGRISPGSGNVKYNEKFKGRVTITADTSTSTAYMELSSLRSEDTAVYYCAGSYYSYDVLDYWGQGTTVTVSSGGGGSGGGGSGGGGSGGGGSDIQMTQSPSFLSASVGDRVTITCKASQNVDNRVAWHQQKPGKAPKALIYSSSHRYKGVPSRFSGSGSGTEFTLTISSLQPEDFATYFCQQFKSYPLTFGQGTKLEIK

SEQ ID NO: 199 - protein, 107 aa, synthetic construct
DIQMTQSPSFLSASVGDRVTITCKASQNVDNRVAWHQQKPGKAPKALIYSSSHRYKGVPSRFSGSGSGTEFTLTISSLQPEDFATYFCQQFKSYPLTFGQGTKLEIK

SEQ ID NO: 200 - protein, 119 aa, synthetic construct
QVQLVQSGAEVKKPGSSVKVSCKASGTDFKLTYIHWVRQAPGQGLEWMGRISPGSGNVKYNEKFKGRVTITADTSTSTAYMELSSLRSEDTAVYYCAGSYYSYDVLDYWGQGTTVTVSS

SEQ ID NO: 201 - protein, 17 aa, synthetic construct
FINPYNDDIQSNERFRG

SEQ ID NO: 202 - protein, 15 aa, synthetic construct
GAGYNFDGAYRFFDF

SEQ ID NO: 203 - protein, 30 aa, synthetic construct
EVRLQQSGPDLIKPGASVKMSCKASGYTFT

SEQ ID NO: 204 - protein, 14 aa, synthetic construct
WVKQRPGQGLEWIG

SEQ ID NO: 205 - protein, 119 aa, synthetic construct
QVQLVQSGAEVKKPGSSVKVSCKASGTDFDKFYIHWVRQAPGQGLEWMGRVSAGSGNVKYNEKFKGRVTITADTSTSTAYMELSSLRSEDTAVYYCAGSYYSYDVLDYWGQGTTVTVSS

SEQ ID NO: 206 - protein, 11 aa, synthetic construct
WGQGTTLTVSS

SEQ ID NO: 207 - protein, 30 aa, synthetic construct
QVQLVQSGAEVKKPGASVKVSCKASGYTFT

SEQ ID NO: 208 - protein, 14 aa, synthetic construct
WVRQAPGQGLEWMG

SEQ ID NO: 209 - protein, 32 aa, synthetic construct
RVTMTSDKSTTTAYMELSSLRSEDTAVYYCAR

SEQ ID NO: 210 - protein, 11 aa, synthetic construct
WGQGTLVTVSS

SEQ ID NO: 211 - skipped

SEQ ID NO: 212 - protein, 14 aa, synthetic construct
WVRQAPGQRLEWMG

SEQ ID NO: 213 - protein, 32 aa, synthetic construct
WVTMTSDKSITTAYMELSRLRSDDTAVYYCAR

SEQ ID NO: 214 - skipped

SEQ ID NO: 215 - protein, 119 aa, synthetic construct
QVQLVQSGAEVKKPGSSVKVSCKASGYSFTTYYIHWVRQAPGQGLEWMGWFSPGSGNTKYNEKFKGRVTITADTSTSTAYMELSSLRSEDTAVYYCAGSYYSYDVLDYWGQGTTVTVSS

SEQ ID NO: 216 - protein, 246 aa, synthetic construct
QVQLVQSGAEVKKPGSSVKVSCKASGYSFTTYYIHWVRQAPGQGLEWMGRIFPGSGNIKYNEKFKGRVTITADTSTSTAYMELSSLRSEDTAVYYCAGSYYSYDVLDYWGQGTTVTVSSGGGGSGGGGSGGGGSGGGGSDIQMTQSPSFLSASVGDRVTITCKASQNVGINVVWHQQKPGKAPKALIYSSSHRYSGVPSRFSGSGSGTEFTLTISSLQPEDFATYFCQQFKSYPLTFGQGTKLEIK

SEQ ID NO: 217 - protein, 32 aa, synthetic construct
RVTITSDKSTTTAYMELSSLRSEDTAVYYCAR

SEQ ID NO: 218 - skipped

SEQ ID NO: 219 - protein, 119 aa, synthetic construct
QVQLVQSGAEVKKPGSSVKVSCKASGYSFTTYYIHWVRQAPGQGLEWMGWFFPGSGNIKYNEKFKGRVTITADTSTSTAYMELSSLRSEDTAVYYCAGSIYSAGVLDYWGQGTTVTVSS

SEQ ID NO: 220 - protein, 246 aa, synthetic construct
QVQLVQSGAEVKKPGSSVKVSCKASGYSFTLGYIHWVRQAPGQGLEWMGWFFPGSGNIKYNEKFKGRVTITADTSTSTAYMELSSLRSEDTAVYYCAGSYYSYDVLDYWGQGTTVTVSSGGGGSGGGGSGGGGSGGGGSDIQMTQSPSFLSASVGDRVTITCKASQNVGINVVWHQQKPGKAPKALIYSSSHRYSGVPSRFSGSGSGTEFTLTISSLQPEDFATYFCQQFKSYPLTFGQGTKLEIK

SEQ ID NO: 221 - protein, 32 aa, synthetic construct
RVTITSDKSATTAYMELSSLRSEDTAVYYCAR

SEQ ID NO: 222 - protein, 246 aa, synthetic construct
QVQLVQSGAEVKKPGSSVKVSCKASGYSFRLTYIHWVRQAPGQGLEWMGWFFPGSGNIKYNEKFKGRVTITADTSTSTAYMELSSLRSEDTAVYYCAGSYYSYDVLDYWGQGTTVTVSSGGGGSGGGGSGGGGSGGGGSDIQMTQSPSFLSASVGDRVTITCKASQNVGINVVWHQQKPGKAPKALIYSSSHRYSGVPSRFSGSGSGTEFTLTISSLQPEDFATYFCQQFKSYPLTFGQGTKLEIK

SEQ ID NO: 223 - protein, 16 aa, synthetic construct
RSSQRLVHSNGNTYLH

SEQ ID NO: 224 - protein, 7 aa, synthetic construct
RVSNRFP

SEQ ID NO: 225 - protein, 9 aa, synthetic construct
SQSTHVPYT

SEQ ID NO: 226 - protein, 23 aa, synthetic construct
DVVMTQSPLSLPVSLGDQASISC

SEQ ID NO: 227 - protein, 15 aa, synthetic construct
WYLQKPGQSPKLLIY

SEQ ID NO: 228 - protein, 32 aa, synthetic construct
GVPDRFSGSGSGTDFTLKISRVEAEDLGIYFC

SEQ ID NO: 229 - protein, 10 aa, synthetic construct
FGGGTKLEIK

SEQ ID NO: 230 - protein, 23 aa, synthetic construct
DVVMTQSPLSLPVTPGEPASISC

SEQ ID NO: 231 - protein, 15 aa, synthetic construct
WYLQKPGQSPQLLIY

SEQ ID NO: 232 - protein, 107 aa, synthetic construct
DIQMTQTTSSLSASLGDRVTISCSASQGISNYLNWYQQKPDGTVKLLIYYTSSLHSGVPSRFSGSGSGTDYSLTISNLEPEDIATYYCQQYSKLPRTFGGGTKVEIK

SEQ ID NO: 233 - protein, 120 aa, synthetic construct
QVQLKESGPGLVAPSQSLSITCTVSGFSLTAYGVNWVRQPPGKGLEWLGMIWGDGNTDYNSALKSRLSISKDNSKSQVFLKMNSLQTDDTARYYCARDRVTATLYAMDYWGQGTSVTVSS

SEQ ID NO: 234 - protein, 23 aa, synthetic construct
EVVMTQSPGTLSLSPGERATLSC

SEQ ID NO: 235 - protein, 15 aa, synthetic construct
WYQQKPGQAPRLLIY

SEQ ID NO: 236 - protein, 32 aa, synthetic construct
GIPDRFSGSGSGTDFTLTISRLEPEDFAVYFC

SEQ ID NO: 237 - protein, 10 aa, synthetic construct
FGGGTKVEIK

SEQ ID NO: 238 - protein, 23 aa, synthetic construct
DVVMTQSPLSLPVTLGQPASISC

SEQ ID NO: 239 - protein, 15 aa, synthetic construct
WYQQRPGQSPRLLIY

SEQ ID NO: 240 - protein, 32 aa, synthetic construct
GVPDRFSGSGSGTDFTLKISRVEAEDVGVYFC

SEQ ID NO: 241 - protein, 10 aa, synthetic construct
FGGGTKVEIK

SEQ ID NO: 242 - protein, 23 aa, synthetic construct
DVVMTQTPLSLPVTPGEPASISC

SEQ ID NO: 243 - protein, 15 aa, synthetic construct
WYLQKPGQSPQLLIY

SEQ ID NO: 244 - skipped

SEQ ID NO: 245 - protein, 10 aa, synthetic construct
FGGGTKVEIK

SEQ ID NO: 246 - protein, 23 aa, synthetic construct
DVVMTQTPLSLSVTPGQPASISC

SEQ ID NO: 247 - protein, 15 aa, synthetic construct
WYLQKPGQSPQLLIY

SEQ ID NO: 248 - skipped

SEQ ID NO: 249 - protein, 10 aa, synthetic construct
FGGGTKVEIK

SEQ ID NO: 250 - protein, 124 aa, synthetic construct
EVRLQQSGPDLIKPGASVKMSCKASGYTFTGYVMHWVKQRPGQGLEWIGFINPYNDDIQSNERFRGKATLTSDKSSTTAYMELSSLTSEDSAVYYCARGAGYNFDGAYRFFDFWGQGTTLTVSS

SEQ ID NO: 251 - protein, 124 aa, synthetic construct
QVQLVQSGAEVKKPGASVKVSCKASGYTFTGYVMHWVRQAPGQGLEWMGFINPYNDDIQSNERFRGRVTMTSDKSTTTAYMELSSLRSEDTAVYYCARGAGYNFDGAYRFFDFWGQGTLVTVSS

SEQ ID NO: 252 - protein, 124 aa, synthetic construct
QVQLVQSGAEVKKPGASVKVSCKASGYTFTGYVMHWVRQAPGQGLEWMGFINPYNDDIQSNERFRGWVTMTSDKSITTAYMELSRLRSDDTAVYYCARGAGYNFDGAYRFFDFWGQGTLVTVSS

SEQ ID NO: 253 - protein, 124 aa, synthetic construct
QVQLVQSGAEVKKPGSSVKVSCKASGYTFTGYVMHWVRQAPGQGLEWMGFINPYNDDIQSNERFRGRVTITSDKSTTTAYMELSSLRSEDTAVYYCARGAGYNFDGAYRFFDFWGQGTLVTVSS

SEQ ID NO: 254 - protein, 124 aa, synthetic construct
QVQLVQSGAEVKKPGASVKVSCKASGYTFTGYVMHWVRQAPGQRLEWMGFINPYNDDIQSNERFRGRVTITSDKSATTAYMELSSLRSEDTAVYYCARGAGYNFDGAYRFFDFWGQGTLVTVSS

SEQ ID NO: 255 - protein, 112 aa, synthetic construct
DVVMTQSPLSLPVSLGDQASISCRSSQRLVHSNGNTYLHWYLQKPGQSPKLLIYRVSNRFPGVPDRFSGSGSGTDFTLKISRVEAEDLGIYFCSQSTHVPYTFGGGTKLEIK

SEQ ID NO: 256 - protein, 112 aa, synthetic construct
DVVMTQSPLSLPVTPGEPASISCRSSQRLVHSNGNTYLHWYLQKPGQSPQLLIYRVSNRFPGVPDRFSGSGSGTDFTLKISRVEAEDVGVYFCSQSTHVPYTFGGGTKVEIK

SEQ ID NO: 257 - protein, 112 aa, synthetic construct
EVVMTQSPGTLSLSPGERATLSCRSSQRLVHSNGNTYLHWYQQKPGQAPRLLIYRVSNRFPGIPDRFSGSGSGTDFTLTISRLEPEDFAVYFCSQSTHVPYTFGGGTKVEIK

SEQ ID NO: 258 - protein, 112 aa, synthetic construct
DVVMTQSPLSLPVTLGQPASISCRSSQRLVHSNGNTYLHWYQQRPGQSPRLLIYRVSNRFPGVPDRFSGSGSGTDFTLKISRVEAEDVGVYFCSQSTHVPYTFGGGTKVEIK

SEQ ID NO: 259 - protein, 112 aa, synthetic construct
DVVMTQTPLSLPVTPGEPASISCRSSQRLVHSNGNTYLHWYLQKPGQSPQLLIYRVSNRFPGVPDRFSGSGSGTDFTLKISRVEAEDVGVYFCSQSTHVPYTFGGGTKVEIK

SEQ ID NO: 260 - protein, 112 aa, synthetic construct
DVVMTQTPLSLSVTPGQPASISCRSSQRLVHSNGNTYLHWYLQKPGQSPQLLIYRVSNRFPGVPDRFSGSGSGTDFTLKISRVEAEDVGVYFCSQSTHVPYTFGGGTKVEIK

SEQ ID NO: 261-299 - skipped (39 entries)

SEQ ID NO: 300 - protein, 15 aa, synthetic construct
WYQQRPGQSPRMLIY

SEQ ID NO: 301 - protein, 28 aa, synthetic construct
EIQLLESGGGLVQPGGSLRLSCAVSGFS

SEQ ID NO: 302 - protein, 14 aa, synthetic construct
AEAAAKEAAAKAAA

SEQ ID NO: 303 - protein, 19 aa, synthetic construct
AEAAAKEAAAKEAAAKAAA

SEQ ID NO: 304 - protein, 11 aa, synthetic construct
WGQGTMVTVSS

SEQ ID NO: 305 - protein, 32 aa, synthetic construct
GVPDRFSGSNSGNDATLKISRVEAEDVGVYFC

SEQ ID NO: 306 - skipped

SEQ ID NO: 307 - protein, 15 aa, synthetic construct
GNGMWFDGAYRFFDF

SEQ ID NO: 308 - protein, 9 aa, synthetic construct
ITTTGYHWN

SEQ ID NO: 309 - skipped

SEQ ID NO: 310 - protein, 14 aa, synthetic construct
WVRQAPGKGLEWVG

SEQ ID NO: 311-312 - skipped (2 entries)

SEQ ID NO: 313 - protein, 16 aa, synthetic construct
YIYSSGSTSYAPSLKS

SEQ ID NO: 314-315 - skipped (2 entries)

SEQ ID NO: 316 - protein, 32 aa, synthetic construct; identical to SEQ ID NO: 36

SEQ ID NO: 317-329 - skipped (13 entries)

SEQ ID NO: 330 - protein, 10 aa, synthetic construct
QFWASTASAV

SEQ ID NO: 331-347 - skipped (17 entries)

SEQ ID NO: 348 - protein, 246 aa, synthetic construct
QVQLVQSGAEVKKPGSSVKVSCKASGHDFDKFYIHWVRQAPGQGLEWMGRVSAGSGNTKYNEKFKGRVTITADTSTSTAYMELSSLRSEDTAVYYCAGSYYSYDVLDYWGQGTTVTVSSGGGGSGGGGSGGGGSGGGGSDIQMTQSPSFLSASVGDRVTITCKASQNVDNRVAWYQQKPGKAPKALIYSSSHRYKGVPSRFSGSGSGTEFTLTISSLQPEDFATYFCQQFKSYPLTFGQGTKLEIK

SEQ ID NO: 349 - protein, 107 aa, synthetic construct; identical to SEQ ID NO: 90

SEQ ID NO: 350 - protein, 119 aa, synthetic construct
QVQLVQSGAEVKKPGSSVKVSCKASGHDFDKFYIHWVRQAPGQGLEWMGRVSAGSGNTKYNEKFKGRVTITADTSTSTAYMELSSLRSEDTAVYYCAGSYYSYDVLDYWGQGTTVTVSS

SEQ ID NO: 351 - protein, 246 aa, synthetic construct
QVQLVQSGAEVKKPGSSVKVSCKASGTDFDKFYIHWVRQAPGQGLEWMGRVSAGSGNVKYNEKFKGRVTITADTSTSTAYMELSSLRSEDTAVYYCAGSYYSYDVLDYWGQGTTVTVSSGGGGSGGGGSGGGGSGGGGSDIQMTQSPSFLSASVGDRVTITCKASQNVGDRVVWYQQKPGKAPKALIYSSSHRYKGVPSRFSGSGSGTEFTLTISSLQPEDFATYFCQQFKSYPLTFGQGTKLEIK

SEQ ID NO: 352 - protein, 246 aa, synthetic construct
QVQLVQSGAEVKKPGSSVKVSCKASGYSFTTYYIHWVRQAPGQGLEWMGWFSAGSGNTKYNEKFKGRVTITADTSTSTAYMELSSLRSEDTAVYYCAVSYYSYDVLDYWGQGTTVTVSSGGGGSGGGGSGGGGSGGGGSDIQMTQSPSFLSASVGDRVTITCKASQNVGINVVWHQQKPGKAPKALIYSSSHRYSGVPSRFSGSGSGTEFTLTISSLQPEDFATYFCQQFKSYPLTFGQGTKLEIK

SEQ ID NO: 353 - protein, 119 aa, synthetic construct
QVQLVQSGAEVKKPGSSVKVSCKASGYSFTTYYIHWVRQAPGQGLEWMGWFSAGSGNTKYNEKFKGRVTITADTSTSTAYMELSSLRSEDTAVYYCAVSYYSYDVLDYWGQGTTVTVSS

SEQ ID NO: 354 - protein, 246 aa, synthetic construct
QVQLVQSGAEVKKPGSSVKVSCKASGYSFTTYYIHWVRQAPGQGLEWMGWFSAGSGNTKYNEKFKGRVTITADTSTSTAYMELSSLRSEDTAVYYCAGSYYSYDVLDYWGQGTTVTVSSGGGGSGGGGSGGGGSGGGGSDIQMTQSPSFLSASVGDRVTITCKASQNVGINVVWHQQKPGKAPKALIYSSSHRYSGVPSRFSGSGSGTEFTLTISSLQPEDFATYFCQQFKSYPLTFGQGTKLEIK

SEQ ID NO: 355 - protein, 119 aa, synthetic construct
QVQLVQSGAEVKKPGSSVKVSCKASGYSFTTYYIHWVRQAPGQGLEWMGWFSAGSGNTKYNEKFKGRVTITADTSTSTAYMELSSLRSEDTAVYYCAGSYYSYDVLDYWGQGTTVTVSS

SEQ ID NO: 356 - protein, 246 aa, synthetic construct
QVQLVQSGAEVKKPGSSVKVSCKASGYSFTTYYIHWVRQAPGQGLEWMGWFFPGSGNTKYNEKFKGRVTITADTSTSTAYMELSSLRSEDTAVYYCAGSYYSYDVLDYWGQGTTVTVSSGGGGSGGGGSGGGGSGGGGSDIQMTQSPSFLSASVGDRVTITCKASQNVGINVVWHQQKPGKAPKALIYSSSHRYSGVPSRFSGSGSGTEFTLTISSLQPEDFATYFCQQFKSYPLTFGQGTKLEIK

SEQ ID NO: 357 - protein, 119 aa, synthetic construct
QVQLVQSGAEVKKPGSSVKVSCKASGYSFTTYYIHWVRQAPGQGLEWMGWFFPGSGNTKYNEKFKGRVTITADTSTSTAYMELSSLRSEDTAVYYCAGSYYSYDVLDYWGQGTTVTVSS

SEQ ID NO: 358 - protein, 246 aa, synthetic construct
QVQLVQSGAEVKKPGSSVKVSCKASGYSFTTYYIHWVRQAPGQGLEWMGWFSPGSGNTKYNEKFKGRVTITADTSTSTAYMELSSLRSEDTAVYYCAVSYYSYDVLDYWGQGTTVTVSSGGGGSGGGGSGGGGSGGGGSDIQMTQSPSFLSASVGDRVTITCKASQNVGINVVWHQQKPGKAPKALIYSSSHRYSGVPSRFSGSGSGTEFTLTISSLQPEDFATYFCQQFKSYPLTFGQGTKLEIK

SEQ ID NO: 359 - protein, 119 aa, synthetic construct
QVQLVQSGAEVKKPGSSVKVSCKASGYSFTTYYIHWVRQAPGQGLEWMGWFSPGSGNTKYNEKFKGRVTITADTSTSTAYMELSSLRSEDTAVYYCAVSYYSYDVLDYWGQGTTVTVSS

SEQ ID NO: 360 - protein, 246 aa, synthetic construct
QVQLVQSGAEVKKPGSSVKVSCKASGYSFTTYYIHWVRQAPGQGLEWMGWFSPGSGNTKYNEKFKGRVTITADTSTSTAYMELSSLRSEDTAVYYCAGSYYSYDVLDYWGQGTTVTVSSGGGGSGGGGSGGGGSGGGGSDIQMTQSPSFLSASVGDRVTITCKASQNVGINVVWHQQKPGKAPKALIYSSSHRYSGVPSRFSGSGSGTEFTLTISSLQPEDFATYFCQQFKSYPLTFGQGTKLEIK

SEQ ID NO: 361 - protein, 119 aa, synthetic construct
QVQLVQSGAEVKKPGSSVKVSCKASGYSFTTYYIHWVRQAPGQGLEWMGRIFPGSGNIKYNEKFKGRVTITADTSTSTAYMELSSLRSEDTAVYYCAGSYYSYDVLDYWGQGTTVTVSS

SEQ ID NO: 362 - protein, 246 aa, synthetic construct
QVQLVQSGAEVKKPGSSVKVSCKASGYSFTTYYIHWVRQAPGQGLEWMGWFFPGSGNIKYNEKFKGRVTITADTSTSTAYMELSSLRSEDTAVYYCAGSIYSAGVLDYWGQGTTVTVSSGGGGSGGGGSGGGGSGGGGSDIQMTQSPSFLSASVGDRVTITCKASQNVGINVVWHQQKPGKAPKALIYSSSHRYSGVPSRFSGSGSGTEFTLTISSLQPEDFATYFCQQFKSYPLTFGQGTKLEIK

SEQ ID NO: 363 - protein, 119 aa, synthetic construct
QVQLVQSGAEVKKPGSSVKVSCKASGYSFTLGYIHWVRQAPGQGLEWMGWFFPGSGNIKYNEKFKGRVTITADTSTSTAYMELSSLRSEDTAVYYCAGSYYSYDVLDYWGQGTTVTVSS

SEQ ID NO: 364 - protein, 119 aa, synthetic construct
QVQLVQSGAEVKKPGSSVKVSCKASGYSFRLTYIHWVRQAPGQGLEWMGWFFPGSGNIKYNEKFKGRVTITADTSTSTAYMELSSLRSEDTAVYYCAGSYYSYDVLDYWGQGTTVTVSS

SEQ ID NO: 365 - protein, 246 aa, synthetic construct
QVQLVQSGAEVKKPGSSVKVSCKASGYSFHNWYIHWVRQAPGQGLEWMGWFFPGSGNIKYNEKFKGRVTITADTSTSTAYMELSSLRSEDTAVYYCAGSYYSYDVLDYWGQGTTVTVSSGGGGSGGGGSGGGGSGGGGSDIQMTQSPSFLSASVGDRVTITCKASQNVGINVVWHQQKPGKAPKALIYSSSHRYSGVPSRFSGSGSGTEFTLTISSLQPEDFATYFCQQFKSYPLTFGQGTKLEIK

SEQ ID NO: 366 - protein, 119 aa, synthetic construct
QVQLVQSGAEVKKPGSSVKVSCKASGYSFHNWYIHWVRQAPGQGLEWMGWFFPGSGNIKYNEKFKGRVTITADTSTSTAYMELSSLRSEDTAVYYCAGSYYSYDVLDYWGQGTTVTVSS

SEQ ID NO: 367 - protein, 16 aa, synthetic construct
RSSQRLVHSNANTYLH

SEQ ID NO: 368 - protein, 16 aa, synthetic construct
RSSQRLVHSNGNAYLH

SEQ ID NO: 369 - protein, 16 aa, synthetic construct
RSSQRLVHSNANAYLH

SEQ ID NO: 370 - protein, 16 aa, synthetic construct
RSSQRLVHSGGNTYLH

SEQ ID NO: 371 - protein, 16 aa, synthetic construct
RSSQRLVHSNGSTYLH

SEQ ID NO: 372 - protein, 16 aa, synthetic construct
RSSQRLVHSGGSTYLH

SEQ ID NO: 373 - protein, 9 aa, synthetic construct
GGGTKVEIK

SEQ ID NO: 374 - protein, 112 aa, synthetic construct
DVVMTQSPLSLPVTLGQPASISCRSSQRLVHSNANTYLHWYQQRPGQSPRLLIYRVSNRFPGVPDRFSGSGSGTDFTLKISRVEAEDVGVYFCSQSTHVPYTFGGGTKVEIK

SEQ ID NO: 375 - protein, 112 aa, synthetic construct
DVVMTQSPLSLPVTLGQPASISCRSSQRLVHSNGNAYLHWYQQRPGQSPRLLIYRVSNRFPGVPDRFSGSGSGTDFTLKISRVEAEDVGVYFCSQSTHVPYTFGGGTKVEIK

SEQ ID NO: 376 - protein, 112 aa, synthetic construct
DVVMTQSPLSLPVTLGQPASISCRSSQRLVHSNANAYLHWYQQRPGQSPRLLIYRVSNRFPGVPDRFSGSGSGTDFTLKISRVEAEDVGVYFCSQSTHVPYTFGGGTKVEIK

SEQ ID NO: 377 - protein, 112 aa, synthetic construct
DVVMTQSPLSLPVTLGQPASISCRSSQRLVHSGGNTYLHWYQQRPGQSPRLLIYRVSNRFPGVPDRFSGSGSGTDFTLKISRVEAEDVGVYFCSQSTHVPYTFGGGTKVEIK

SEQ ID NO: 378 - protein, 112 aa, synthetic construct
DVVMTQSPLSLPVTLGQPASISCRSSQRLVHSNGSTYLHWYQQRPGQSPRLLIYRVSNRFPGVPDRFSGSGSGTDFTLKISRVEAEDVGVYFCSQSTHVPYTFGGGTKVEIK

SEQ ID NO: 379 - protein, 112 aa, synthetic construct
DVVMTQSPLSLPVTLGQPASISCRSSQRLVHSGGSTYLHWYQQRPGQSPRLLIYRVSNRFPGVPDRFSGSGSGTDFTLKISRVEAEDVGVYFCSQSTHVPYTFGGGTKVEIK

SEQ ID NO: 380 - protein, 108 aa, synthetic construct
DSVTTQSPLSLPVTLGQPASISCSGEKLSDKYVHWYQQRPGQSPRMLIYENDRRPSGVPDRFSGSNSGNDATLKISRVEAEDVGVYFCQFWASTNSAVFGGGTKVEIK

SEQ ID NO: 381 - protein, 107 aa, synthetic construct
SSETTQPPSVSVSPGQTASITCSGEKLSDKYVHWYQQKPGQSPVMVIYENDRRPSGIPERFSGSNSGNTATLTISGTQAMDEADYFCQFWASTNSAVFGGGTQLTVL

SEQ ID NO: 382 - protein, 107 aa, synthetic construct
SSETTQPPSVSVSPGQTASITCSGEKLSDKYVHWYQQKPGQSPVMVIYENDRRPSGIPERFSGSNSGNTATLTISGTQAMDEADYFCQFWDSTASAVFGGGTQLTVL

SEQ ID NO: 383 - DNA, 321 bp, synthetic construct
  source 1..321: mol_type = other DNA
gacatccagatgacccagtctccatccttcctgtccgcctctgtgggcgacagagtgaccatcacatgcaaggcctctcagaacgtgggcatcaacgtcgtgtggcaccagcagaagcctggcaaggctcctaaggctctgatctactcctccagccaccggtactctggcgtgccctctagattttccggctctggctctggcaccgagtttaccctgacaatctccagcctgcagcctgaggacttcgccacctacttttgccagcagttcaagagctaccctctgacctttggccagggcaccaagctggaaatcaag

SEQ ID NO: 384 - protein, 108 aa, synthetic construct
DSVTTQSPLSLPVTLGQPASISCSGEKLSDKYVHWYQQRPGQSPRMLIYENDRRPSGVPDRFSGSNSGNDATLKISRVEAEDVGVYFCQFWASTASAVFGGGTKVEIK

SEQ ID NO: 385 - protein, 107 aa, synthetic construct
SSETTQPPSVSVSPGQTASITCSGEKLSDKYVHWYQQKPGQSPVMVIYENDRRPSGIPERFSGSNSGNTATLTISGTQAMDEADYFCQFWASTASAVFGGGTQLTVL

SEQ ID NO: 386 - protein, 246 aa, synthetic construct
EIQLLESGGGLVQPGGSLRLSCAVSGFSITTTGYHWNWVRQAPGKGLEWVGYIYSSGSTSYNPSLKSRFTISRDTSKNTFYLQMNSLRAEDTAVYYCARGDWHYFDYWGQGTMVTVSSGGGGSGGGGSGGGGSGGGGSDSVTTQSPLSLPVTLGQPASISCSGEKLSDKYVHWYQQRPGQSPRMLIYENDRRPSGVPDRFSGSNSGNDATLKISRVEAEDVGVYFCQFWDSTASAVFGGGTKVEIK

SEQ ID NO: 387 - protein, 246 aa, synthetic construct
EIQLLESGGGLVQPGGSLRLSCAVSGFSITTTGYHWNWVRQAPGKGLEWVGYIYSSGSTSYNPSLKSRFTISRDTSKNTFYLQMNSLRAEDTAVYYCARGDWHYFDYWGQGTMVTVSSGGGGSGGGGSGGGGSGGGGSDSVTTQSPLSLPVTLGQPASISCSGEKLSDKYVHWYQQRPGQSPRMLIYENDRRPSGVPDRFSGSNSGNDATLKISRVEAEDVGVYFCQFWASTNSAVFGGGTKVEIK

SEQ ID NO: 388 - protein, 245 aa, synthetic construct
EIQLLESGGGLVQPGGSLRLSCAVSGFSITTTGYHWNWVRQAPGKGLEWVGYIYSSGSTSYNPSLKSRFTISRDTSKNTFYLQMNSLRAEDTAVYYCARGDWHYFDYWGQGTMVTVSSGGGGSGGGGSGGGGSGGGGSSSETTQPPSVSVSPGQTASITCSGEKLSDKYVHWYQQKPGQSPVMVIYENDRRPSGIPERFSGSNSGNTATLTISGTQAMDEADYFCQFWASTNSAVFGGGTQLTVL

SEQ ID NO: 389 - protein, 245 aa, synthetic construct
EIQLLESGGGLVQPGGSLRLSCAVSGFSITTTGYHWNWVRQAPGKGLEWVGYIYSSGSTSYNPSLKSRFTISRDTSKNTFYLQMNSLRAEDTAVYYCARGDWHYFDYWGQGTMVTVSSGGGGSGGGGSGGGGSGGGGSSSETTQPPSVSVSPGQTASITCSGEKLSDKYVHWYQQKPGQSPVMVIYENDRRPSGIPERFSGSNSGNTATLTISGTQAMDEADYFCQFWDSTASAVFGGGTQLTVL

SEQ ID NO: 390 - protein, 246 aa, synthetic construct
EIQLLESGGGLVQPGGSLRLSCAVSGFSITTTGYHWNWVRQAPGKGLEWVGYIYSSGSTSYAPSLKSRFTISRDTSKNTFYLQMNSLRAEDTAVYYCARGDWHYFDYWGQGTMVTVSSGGGGSGGGGSGGGGSGGGGSDSVTTQSPLSLPVTLGQPASISCSGEKLSDKYVHWYQQRPGQSPRMLIYENDRRPSGVPDRFSGSNSGNDATLKISRVEAEDVGVYFCQFWDSTNSAVFGGGTKVEIK

SEQ ID NO: 391 - protein, 245 aa, synthetic construct
EIQLLESGGGLVQPGGSLRLSCAVSGFSITTTGYHWNWVRQAPGKGLEWVGYIYSSGSTSYAPSLKSRFTISRDTSKNTFYLQMNSLRAEDTAVYYCARGDWHYFDYWGQGTMVTVSSGGGGSGGGGSGGGGSGGGGSSSETTQPPSVSVSPGQTASITCSGEKLSDKYVHWYQQKPGQSPVMVIYENDRRPSGIPERFSGSNSGNTATLTISGTQAMDEADYFCQFWDSTNSAVFGGGTQLTVL

SEQ ID NO: 392 - protein, 246 aa, synthetic construct
EIQLLESGGGLVQPGGSLRLSCAVSGFSITTTGYHWNWVRQAPGKGLEWVGYIYSSGSTSYAPSLKSRFTISRDTSKNTFYLQMNSLRAEDTAVYYCARGDWHYFDYWGQGTMVTVSSGGGGSGGGGSGGGGSGGGGSDSVTTQSPLSLPVTLGQPASISCSGEKLSDKYVHWYQQRPGQSPRMLIYENDRRPSGVPDRFSGSNSGNDATLKISRVEAEDVGVYFCQFWASTASAVFGGGTKVEIK

SEQ ID NO: 393 - protein, 245 aa, synthetic construct
EIQLLESGGGLVQPGGSLRLSCAVSGFSITTTGYHWNWVRQAPGKGLEWVGYIYSSGSTSYAPSLKSRFTISRDTSKNTFYLQMNSLRAEDTAVYYCARGDWHYFDYWGQGTMVTVSSGGGGSGGGGSGGGGSGGGGSSSETTQPPSVSVSPGQTASITCSGEKLSDKYVHWYQQKPGQSPVMVIYENDRRPSGIPERFSGSNSGNTATLTISGTQAMDEADYFCQFWASTASAVFGGGTQLTVL

SEQ ID NO: 394-499 - skipped (106 entries)

SEQ ID NO: 500 - protein, 448 aa, synthetic construct
EIQLLESGGGLVQPGGSLRLSCAVSGFSIIRVGYHWNWVRQAPGKGLEWVGYIHRSGSTSYNPSLKSRFTISRDTSKNTFYLQMNSLRAEDTAVYYCARGDWHYFDYWGQGTMVTVSSASTKGPSVFPLAPSSKSTSGGTAALGCLVKDYFPEPVTVSWNSGALTSGVHTFPAVLQSSGLYSLSSVVTVPSSSLGTQTYICNVNHKPSNTKVDKRVEPKSCDKTHTCPPCPAPELLGGPSVFLFPPKPKDTLMISRTPEVTCVVVDVSHEDPEVKFNWYVDGVEVHNAKTKPREEQYASTYRVVSVLTVLHQDWLNGKEYKCKVSNKALPAPIEKTISKAKGQPREPQVCTLPPSREEMTKNQVSLSCAVKGFYPSDIAVEWESNGQPENNYKTTPPVLDSDGSFFLVSKLTVDKSRWQQGNVFSCSVMHEALHNHYTQKSLSLSPGK

SEQ ID NO: 501 - protein, 215 aa, synthetic construct
DSVTTQSPLSLPVTLGQPASISCSGEKLSDKYVHWYQQRPGQSPRMLIYENDRRPSGVPDRFSGSNSGNDATLKISRVEAEDVGVYFCQFWDSTNSAVFGGGTKVEIKRTVAAPSVFIFPPSDEQLKSGTASVVCLLNNFYPREAKVQWKVDNALQSGNSQESVTEQDSKDSTYSLSSTLTLSKADYEKHKVYACEVTHQGLSSPVTKSFNRGEC

SEQ ID NO: 502 - protein, 12 aa, synthetic construct
GFSIIRVGYHWN

SEQ ID NO: 503 - protein, 16 aa, synthetic construct
YIHRSGSTSYNPSLKS

SEQ ID NO: 504 - protein, 8 aa, synthetic construct
GDWHYFDY

SEQ ID NO: 505 - protein, 118 aa, synthetic construct
EIQLLESGGGLVQPGGSLRLSCAVSGFSIIRVGYHWNWVRQAPGKGLEWVGYIHRSGSTSYNPSLKSRFTISRDTSKNTFYLQMNSLRAEDTAVYYCARGDWHYFDYWGQGTMVTVSS

SEQ ID NO: 506 - protein, 232 aa, synthetic construct
EPKSCDKTHTCPPCPAPELLGGPSVFLFPPKPKDTLMISRTPEVTCVVVDVSHEDPEVKFNWYVDGVEVHNAKTKPREEQYASTYRVVSVLTVLHQDWLNGKEYKCKVSNKALPAPIEKTISKAKGQPREPQVCTLPPSREEMTKNQVSLSCAVKGFYPSDIAVEWESNGQPENNYKTTPPVLDSDGSFFLVSKLTVDKSRWQQGNVFSCSVMHEALHNHYTQKSLSLSPGK

SEQ ID NO: 507 - protein, 230 aa, synthetic construct
EPKSCDKTHTCPPCPAPELLGGPSVFLFPPKPKDTLMISRTPEVTCVVVDVSHEDPEVKFNWYVDGVEVHNAKTKPREEQYASTYRVVSVLTVLHQDWLNGKEYKCKVSNKALPAPIEKTISKAKGQPREPQVCTLPPSREEMTKNQVSLSCAVKGFYPSDIAVEWESNGQPENNYKTTPPVLDSDGSFFLVSKLTVDKSRWQQGNVFSCSVMHEALHNHYTQKSLSLSP

SEQ ID NO: 508 - protein, 225 aa, synthetic construct
DKTHTCPPCPAPELLGGPSVFLFPPKPKDTLMISRTPEVTCVVVDVSHEDPEVKFNWYVDGVEVHNAKTKPREEQYASTYRVVSVLTVLHQDWLNGKEYKCKVSNKALPAPIEKTISKAKGQPREPQVYTLPPCREEMTKNQVSLWCLVKGFYPSDIAVEWESNGQPENNYKTTPPVLDSDGSFFLYSKLTVDKSRWQQGNVFSCSVMHEALHNHYTQKSLSLSP

SEQ ID NO: 509 - protein, 473 aa, synthetic construct
EIQLLESGGGLVQPGGSLRLSCAVSGFSIIRVGYHWNWVRQAPGKGLEWVGYIHRSGSTSYNPSLKSRFTISRDTSKNTFYLQMNSLRAEDTAVYYCARGDWHYFDYWGQGTMVTVSSGGGGSGGGGSGGGGSGGGGSDSVTTQSPLSLPVTLGQPASISCSGEKLSDKYVHWYQQRPGQSPRMLIYENDRRPSGVPDRFSGSNSGNDATLKISRVEAEDVGVYFCQFWDSTNSAVFGGGTKVEIKDKTHTCPPCPAPELLGGPSVFLFPPKPKDTLMISRTPEVTCVVVDVSHEDPEVKFNWYVDGVEVHNAKTKPREEQYASTYRVVSVLTVLHQDWLNGKEYKCKVSNKALPAPIEKTISKAKGQPREPQVCTLPPSREEMTKNQVSLSCAVKGFYPSDIAVEWESNGQPENNYKTTPPVLDSDGSFFLVSKLTVDKSRWQQGNVFSCSVMHEALHNHYTQKSLSLSPGK

SEQ ID NO: 510 - skipped

SEQ ID NO: 511 - protein, 225 aa, synthetic construct
DKTHTCPPCPAPELLGGPSVFLFPPKPKDTLMISRTPEVTCVVVDVSHEDPEVKFNWYVDGVEVHNAKTKPREEQYASTYRVVSVLTVLHQDWLNGKEYKCKVSNKALPAPIEKTISKAKGQPREPQVCTLPPSREEMTKNQVSLSCAVKGFYPSDIAVEWESNGQPENNYKTTPPVLDSDGSFFLVSKLTVDKSRWQQGNVFSCSVMHEALHNHYTQKSLSLSP

SEQ ID NO: 512 - protein, 124 aa, synthetic construct; identical to SEQ ID NO: 253

SEQ ID NO: 513 - protein, 330 aa, synthetic construct
ASTKGPSVFPLAPSSKSTSGGTAALGCLVKDYFPEPVTVSWNSGALTSGVHTFPAVLQSSGLYSLSSVVTVPSSSLGTQTYICNVNHKPSNTKVDKRVEPKSCDKTHTCPPCPAPELLGGPSVFLFPPKPKDTLMISRTPEVTCVVVDVSHEDPEVKFNWYVDGVEVHNAKTKPREEQYASTYRVVSVLTVLHQDWLNGKEYKCKVSNKALPAPIEKTISKAKGQPREPQVYTLPPCREEMTKNQVSLWCLVKGFYPSDIAVEWESNGQPENNYKTTPPVLDSDGSFFLYSKLTVDKSRWQQGNVFSCSVMHEALHNHYTQKSLSLSPGK

SEQ ID NO: 514 - protein, 328 aa, synthetic construct
ASTKGPSVFPLAPSSKSTSGGTAALGCLVKDYFPEPVTVSWNSGALTSGVHTFPAVLQSSGLYSLSSVVTVPSSSLGTQTYICNVNHKPSNTKVDKRVEPKSCDKTHTCPPCPAPELLGGPSVFLFPPKPKDTLMISRTPEVTCVVVDVSHEDPEVKFNWYVDGVEVHNAKTKPREEQYASTYRVVSVLTVLHQDWLNGKEYKCKVSNKALPAPIEKTISKAKGQPREPQVYTLPPCREEMTKNQVSLWCLVKGFYPSDIAVEWESNGQPENNYKTTPPVLDSDGSFFLYSKLTVDKSRWQQGNVFSCSVMHEALHNHYTQKSLSLSP

SEQ ID NO: 515 - protein, 232 aa, synthetic construct
EPKSCDKTHTCPPCPAPELLGGPSVFLFPPKPKDTLMISRTPEVTCVVVDVSHEDPEVKFNWYVDGVEVHNAKTKPREEQYASTYRVVSVLTVLHQDWLNGKEYKCKVSNKALPAPIEKTISKAKGQPREPQVYTLPPCREEMTKNQVSLWCLVKGFYPSDIAVEWESNGQPENNYKTTPPVLDSDGSFFLYSKLTVDKSRWQQGNVFSCSVMHEALHNHYTQKSLSLSPGK

SEQ ID NO: 516 - protein, 230 aa, synthetic construct
EPKSCDKTHTCPPCPAPELLGGPSVFLFPPKPKDTLMISRTPEVTCVVVDVSHEDPEVKFNWYVDGVEVHNAKTKPREEQYASTYRVVSVLTVLHQDWLNGKEYKCKVSNKALPAPIEKTISKAKGQPREPQVYTLPPCREEMTKNQVSLWCLVKGFYPSDIAVEWESNGQPENNYKTTPPVLDSDGSFFLYSKLTVDKSRWQQGNVFSCSVMHEALHNHYTQKSLSLSP

SEQ ID NO: 517 - protein, 124 aa, synthetic construct
QVQLVQSGAEVKKPGSSVKVSCKASGYTFTGYVMHWVRQAPGQGLEWMGFIIPIFGTANYAQKFQGRVTITSDKSTTTAYMELSSLRSEDTAVYYCARGAGYNFDGAYRFFDFWGQGTLVTVSS

SEQ ID NO: 518 - protein, 246 aa, synthetic construct
EIQLLESGGGLVQPGGSLRLSCAVSGFSIIRVGYHWNWVRQAPGKGLEWVGYIHRSGSTSYNPSLKSRFTISRDTSKNTFYLQMNSLRAEDTAVYYCARGDWHYFDYWGQGTMVTVSSGGGGSGGGGSGGGGSGGGGSDSVTTQSPLSLPVTLGQPASISCSGEKLSDKYVHWYQQRPGQSPRMLIYENDRRPSGVPDRFSGSNSGNDATLKISRVEAEDVGVYFCQFWDSTNSAVFGGGTKVEIK

SEQ ID NO: 519-1099 - skipped (581 entries)

SEQ ID NO: 1100 - protein, 119 aa, synthetic construct; identical to SEQ ID NO: 9

SEQ ID NO: 1101 - protein, 106 aa, synthetic construct
QSVLTQPPSVSEAPRQRVTISCKASQNVGINVVWHQQLPGKAPKALIYSSSHRYSGVSDRFSGSGSGTSFSLAISGLQSEDEADYFCQQFKSYPLTFGTGTKVTVL

SEQ ID NO: 1102-1140 - skipped (39 entries)

SEQ ID NO: 1141 - protein, 5 aa, synthetic construct
SYAMS

SEQ ID NO: 1142 - protein, 17 aa, synthetic construct
HISNGGDYIYYADTVKG

SEQ ID NO: 1143 - protein, 12 aa, synthetic construct
PSYYSDPWFFDV

SEQ ID NO: 1144 - protein, 7 aa, synthetic construct
GFTFRSY

SEQ ID NO: 1145 - protein, 6 aa, synthetic construct
SNGGDY

SEQ ID NO: 1146 - protein, 10 aa, synthetic construct
GFTFRSYAMS

SEQ ID NO: 1147 - protein, 10 aa, synthetic construct
SAGSSVSFMH

SEQ ID NO: 1148 - protein, 7 aa, synthetic construct
DTSKLAS

SEQ ID NO: 1149 - protein, 9 aa, synthetic construct
LQGSGFPLT

SEQ ID NO: 1150 - protein, 6 aa, synthetic construct
GSSVSF

SEQ ID NO: 1151 - protein, 106 aa, synthetic construct
ENVLTQSPAIMSASPGEKVTMTCSAGSSVSFMHWYQQKSSTSPKLWIYDTSKLASGVPGRFSGSGSGNSFSLTISSMEAEDVAIYYCLQGSGFPLTFGSGTKLEIK

SEQ ID NO: 1152 - protein, 121 aa, synthetic construct
DVKLVESGEGLVKPGGSLKLSCAASGFTFRSYAMSWVRQTPEKRLEWVAHISNGGDYIYYADTVKGRFTISRDNARNTLYLQMSSLKSEDTAMYYCTRPSYYSDPWFFDVWGTGTTVTVSS

SEQ ID NO: 1153 - protein, 121 aa, synthetic construct
EVQLVESGGGLVQPGGSLRLSCAASGFTFRSYAMSWVRQAPGKGLEWVAHISNGGDYIYYADTVKGRFTISRDNAKNSLYLQMNSLRAEDTAVYYCTRPSYYSDPWFFDVWGQGTTVTVSS

SEQ ID NO: 1154 - protein, 121 aa, synthetic construct
QVQLVESGGGVVQPGRSLRLSCAASGFTFRSYAMSWVRQAPGKGLEWVAHISNGGDYIYYADTVKGRFTISRDNSKNTLYLQMSSLRAEDTAVYYCTRPSYYSDPWFFDVWGQGTTVTVSS

SEQ ID NO: 1155 - protein, 121 aa, synthetic construct
EVQLVESGGGLVQPGGSLRLSCAASGFTFRSYAMSWVRQAPGKGLEWVAHISNGGDYIYYADTVKGRFTISRDNSKNTLYLQMNSLRAEDTAVYYCTRPSYYSDPWFFDVWGQGTTVTVSS

SEQ ID NO: 1156 - protein, 121 aa, synthetic construct
QVQLVQSGSELKKPGASVKVSCKASGFTFRSYAMSWVRQAPGQGLEWVAHISNGGDYIYYADTVKGRFVISRDNSVNTLYLQISSLKAEDTAVYYCTRPSYYSDPWFFDVWGQGTTVTVSS

SEQ ID NO: 1157 - protein, 121 aa, synthetic construct
QVQLVQSGAEVKKPGASVKVSCKASGFTFRSYAMSWVRQAPGQRLEWVAHISNGGDYIYYADTVKGRFTITRDNSANTLYMELSSLRSEDTAVYYCTRPSYYSDPWFFDVWGQGTTVTVSS

SEQ ID NO: 1158 - protein, 106 aa, synthetic construct
ENVLTQSPATLSLSPGERATLSCSAGSSVSFMHWYQQKPGQAPKLLIYDTSKLASGIPARFSGSGSGNDFTLTISSLEPEDFAVYYCLQGSGFPLTFGQGTKLEIK

SEQ ID NO: 1159 - protein, 106 aa, synthetic construct
ENVLTQSPDFQSVTPKEKVTITCSAGSSVSFMHWYQQKPDQSPKLLIYDTSKLASGVPSRFSGSGSGNDFTLTINSLEAEDAATYYCLQGSGFPLTFGQGTKLEIK

SEQ ID NO: 1160 - protein, 106 aa, synthetic construct
DNQLTQSPSSLSASVGDRVTITCSAGSSVSFMHWYQQKPGKVPKLLIYDTSKLASGVPSRFSGSGSGNDFTLTISSLQPEDVATYYCLQGSGFPLTFGQGTKLEIK

SEQ ID NO: 1161 - protein, 106 aa, synthetic construct
ANQLTQSPSSLSASVGDRVTITCSAGSSVSFMHWYQQKPGKAPKLLIYDTSKLASGVPSRFSGSGSGNDFTLTISSLQPEDFATYYCLQGSGFPLTFGQGTKLEIK

SEQ ID NO: 1162 - protein, 106 aa, synthetic construct
DNVLTQSPDSLAVSLGERATINCSAGSSVSFMHWYQQKPGQPPKLLIYDTSKLASGVPDRFSGSGSGNDFTLTISSLQAEDVAVYYCLQGSGFPLTFGQGTKLEIK

SEQ ID NO: 1163-1184 - skipped (22 entries)

SEQ ID NO: 1185 - protein, 5 aa, synthetic construct
GSWMN

SEQ ID NO: 1186 - protein, 17 aa, synthetic construct
RIYPGDGDTDYSGKFKG

SEQ ID NO: 1187 - protein, 12 aa, synthetic construct
SGYFNYVPVFDY

SEQ ID NO: 1188 - protein, 7 aa, synthetic construct
GYTFSGS

SEQ ID NO: 1189 - protein, 6 aa, synthetic construct
YPGDGD

SEQ ID NO: 1190 - protein, 10 aa, synthetic construct
GYTFSGSWMN

SEQ ID NO: 1191 - protein, 10 aa, synthetic construct
SANSTVGYIH

SEQ ID NO: 1192 - protein, 7 aa, synthetic construct
TTSNLAS

SEQ ID NO: 1193 - protein, 8 aa, synthetic construct
HQWSFYPT

SEQ ID NO: 1194 - protein, 6 aa, synthetic construct
NSTVGY

SEQ ID NO: 1195 - protein, 105 aa, synthetic construct
QIVLTQSPAIMSASLGEEIALTCSANSTVGYIHWYQQKSGTSPKLLIYTTSNLASGVPSRFSGSGSGTFYSLTISSVEAEDAADYFCHQWSFYPTFGGGTKLEIK

SEQ ID NO: 1196 - protein, 121 aa, synthetic construct
QIQLQQSGPEVVKPGASVQISCKASGYTFSGSWMNWVKQRPGKGLEWIGRIYPGDGDTDYSGKFKGRATLTADKSSSTAYMRLSSLTSEDSAVYFCARSGYFNYVPVFDYWGQGTTLSVSS

SEQ ID NO: 1197 - protein, 121 aa, synthetic construct
QIQLVQSGAEVKKPGASVKVSCKASGYTFSGSWMNWVRQAPGQGLEWIGRIYPGDGDTDYSGKFKGRATLTADKSTSTAYMELSSLRSEDTAVYYCARSGYFNYVPVFDYWGQGTTVTVSS

SEQ ID NO: 1198 - protein, 121 aa, synthetic construct
QIQLVQSGAEVKKPGSSVKVSCKASGYTFSGSWMNWVRQAPGQGLEWIGRIYPGDGDTDYSGKFKGRATLTADKSTSTAYMELSSLRSEDTAVYYCARSGYFNYVPVFDYWGQGTTVTVSS

SEQ ID NO: 1199 - protein, 121 aa, synthetic construct
EIQLVQSGAEVKKPGESLKISCKASGYTFSGSWMNWVRQMPGKGLEWIGRIYPGDGDTDYSGKFKGQATLSADKSISTAYLQWSSLKASDTAMYYCARSGYFNYVPVFDYWGQGTTVTVSS

SEQ ID NO: 1200 - protein, 121 aa, synthetic construct
QIQLVQSGSELKKPGASVKVSCKASGYTFSGSWMNWVRQAPGQGLEWIGRIYPGDGDTDYSGKFKGRAVLSADKSVSTAYLQISSLKAEDTAVYYCARSGYFNYVPVFDYWGQGTTVTVSS

SEQ ID NO: 1201 - protein, 121 aa, synthetic construct
QIQLVQSGSELKKPGASVKVSCKASGYTFSGSWMNWVRQAPGQGLEWIGRIYPGDGDTDYSGKFKGRAVLSADKSVSMAYLQISSLKAEDTAVYYCARSGYFNYVPVFDYWGQGTTVTVSS

SEQ ID NO: 1202 - protein, 121 aa, synthetic construct
EIQLVESGGGLVQPGRSLRLSCTASGYTFSGSWMNWVRQAPGKGLEWIGRIYPGDGDTDYSGKFKGRATLSADKSKSIAYLQMNSLKTEDTAVYYCARSGYFNYVPVFDYWGQGTTVTVSS

SEQ ID NO: 1203 - protein, 105 aa, synthetic construct
EIVLTQSPATLSLSPGERATLSCSANSTVGYIHWYQQKPGQAPKLLIYTTSNLASGIPARFSGSGSGTDYTLTISSLEPEDFAVYFCHQWSFYPTFGQGTKLEIK

SEQ ID NO: 1204 - protein, 105 aa, synthetic construct
DIQLTQSPSFLSASVGDRVTITCSANSTVGYIHWYQQKPGKAPKLLIYTTSNLASGVPSRFSGSGSGTEYTLTISSLQPEDFATYFCHQWSFYPTFGQGTKLEIK

SEQ ID NO: 1205 - protein, 105 aa, synthetic construct
EIVLTQSPATLSLSPGERATLSCSANSTVGYIHWYQQKPGQAPKLLIYTTSNLASGIPARFSGSGPGTDYTLTISSLEPEDFAVYFCHQWSFYPTFGQGTKLEIK

SEQ ID NO: 1206 - protein, 105 aa, synthetic construct
DIVLTQSPDSLAVSLGERATINCSANSTVGYIHWYQQKPGQPPKLLIYTTSNLASGVPDRFSGSGSGTDYTLTISSLQAEDVAVYFCHQWSFYPTFGQGTKLEIK

SEQ ID NO: 1207 - protein, 105 aa, synthetic construct
EIVLTQSPDFQSVTPKEKVTITCSANSTVGYIHWYQQKPDQSPKLLIYTTSNLASGVPSRFSGSGSGTDYTLTINSLEAEDAATYFCHQWSFYPTFGQGTKLEIK

SEQ ID NO: 1208-1287 - skipped (80 entries)

SEQ ID NO: 1288 - protein, 5 aa, synthetic construct
SYGMS

SEQ ID NO: 1289 - protein, 17 aa, synthetic construct
LISSGGSYTYYTDSVKG

SEQ ID NO: 1290 - protein, 8 aa, synthetic construct
HGGNFFDY

SEQ ID NO: 1291 - protein, 7 aa, synthetic construct
GFTFRSY

SEQ ID NO: 1292 - protein, 6 aa, synthetic construct
SSGGSY

SEQ ID NO: 1293 - protein, 10 aa, synthetic construct
GFTFRSYGMS

SEQ ID NO: 1294 - protein, 10 aa, synthetic construct
SVSSSVSYMH

SEQ ID NO: 1295 - protein, 7 aa, synthetic construct
DTSKLAS

SEQ ID NO: 1296 - protein, 10 aa, synthetic construct
QQWSSNPQYT

SEQ ID NO: 1297 - protein, 6 aa, synthetic construct
SSSVSY

SEQ ID NO: 1298 - protein, 5 aa, synthetic construct
SSWMN

SEQ ID NO: 1299 - protein, 17 aa, synthetic construct
RIYPGDGDTKYNGKFKG

SEQ ID NO: 1300 - protein, 10 aa, synthetic construct
RGTGGWYFDV

SEQ ID NO: 1301 - protein, 10 aa, synthetic construct
RGTGGWYFDV

SEQ ID NO: 1302 - protein, 7 aa, synthetic construct
GYAFSSS

SEQ ID NO: 1303 - protein, 6 aa, synthetic construct
YPGDGD

SEQ ID NO: 1304 - protein, 10 aa, synthetic construct
GYAFSSSWMN

SEQ ID NO: 1305 - protein, 15 aa, synthetic construct
RASESVDSSGNSFMH

SEQ ID NO: 1306 - protein, 7 aa, synthetic construct
RASNLES

SEQ ID NO: 1307 - protein, 9 aa, synthetic construct
QQSFDDPFT

SEQ ID NO: 1308 - protein, 11 aa, synthetic construct
SESVDSSGNSF

SEQ ID NO: 1309 - protein, 246 aa, synthetic construct
QVQLVQSGAEVKKPGSSVKVSCKASGHDFDKFYIHWVRQAPGQGLEWMGRVSAGSGNVKYNEKFKGRVTITADTSTSTAYMELSSLRSEDTAVYYCAGSYYSYDVLDYWGQGTTVTVSSGGGGSGGGGSGGGGSGGGGSDIQMTQSPSFLSASVGDRVTITCKASQNVGNRVAWYQQKPGKAPKALIYSSSHRYKGVPSRFSGSGSGTEFTLTISSLQPEDFATYFCQQFKSYPLTFGQGTKLEIK

SEQ ID NO: 1310 - protein, 119 aa, synthetic construct; identical to SEQ ID NO: 94

SEQ ID NO: 1311 - protein, 119 aa, synthetic construct
QVQLVQSGAEVKKPGSSVKVSCKASGTDFKLTYIHWVRQAPGQGLEWMGRIFPGSGNVKYNEKFKGRVTITADTSTSTAYMELSSLRSEDTAVYYCAVSYYSYDVLDYWGQGTTVTVSS

SEQ ID NO: 1312 - protein, 119 aa, synthetic construct
QVQLVQSGAEVKKPGSSVKVSCKASGHDFRLTYIHWVRQAPGQGLEWMGRISAGSGNVKYNEKFKGRVTITADTSTSTAYMELSSLRSEDTAVYYCAVSYYSYDVLDYWGQGTTVTVSS

SEQ ID NO: 1313 - protein, 107 aa, synthetic construct; identical to SEQ ID NO: 90

SEQ ID NO: 1314 - protein, 107 aa, synthetic construct; identical to SEQ ID NO: 141

SEQ ID NO: 1315 - protein, 5 aa, synthetic construct
AYGVN

SEQ ID NO: 1316 - protein, 16 aa, synthetic construct
MIWGDGNTDYNSALKS

SEQ ID NO: 1317 - protein, 12 aa, synthetic construct
DRVTATLYAMDY

SEQ ID NO: 1318 - protein, 7 aa, synthetic construct
GFSLTAY

SEQ ID NO: 1319 - protein, 5 aa, synthetic construct
WGDGN

SEQ ID NO: 1320 - protein, 10 aa, synthetic construct
GFSLTAYGVN

SEQ ID NO: 1321 - protein, 11 aa, synthetic construct
SASQGISNYLN

SEQ ID NO: 1322 - protein, 7 aa, synthetic construct
YTSSLHS

SEQ ID NO: 1323 - protein, 9 aa, synthetic construct
QQYSKLPRT

SEQ ID NO: 1324 - protein, 107 aa, synthetic construct
DIQMTQSPSSLSASVGDRVTITCSASQGISNYLNWYQQTPGKAPKLLIYYTSSLHSGVPSRFSGSGSGTDYTFTISSLQPEDIATYYCQQYSKLPRTFGQGTKLQIT

SEQ ID NO: 1325 - protein, 120 aa, synthetic construct
QVQLQESGPGLVRPSQTLSLTCTVSGFSLTAYGVNWVRQPPGRGLEWLGMIWGDGNTDYNSALKSRVTMLKDTSKNQFSLRLSSVTAADTAVYYCARDRVTATLYAMDYWGQGSLVTVSS

SEQ ID NO: 1326 - protein, 246 aa, synthetic construct
QVQLVQSGAEVKKPGSSVKVSCKASGHDFRLTYIHWVRQAPGQGLEWMGRVSAGSGNTKYNEKFKGRVTITADTSTSTAYMELSSLRSEDTAVYYCAVSYYSYDVLDYWGQGTTVTVSSGGGGSGGGGSGGGGSGGGGSDIQMTQSPSFLSASVGDRVTITCKASQNVGDRVVWHQQKPGKAPKALIYSSSHRYKGVPSRFSGSGSGTEFTLTISSLQPEDFATYFCQQFKSYPLTFGQGTKLEIK

SEQ ID NO: 1327 - protein, 246 aa, synthetic construct
QVQLVQSGAEVKKPGSSVKVSCKASGHDFRLTYIHWVRQAPGQGLEWMGRVSAGSGNVKYNEKFKGRVTITADTSTSTAYMELSSLRSEDTAVYYCAVSYYSYDVLDYWGQGTTVTVSSGGGGSGGGGSGGGGSGGGGSDIQMTQSPSFLSASVGDRVTITCKASQNVGNRVVWHQQKPGKAPKALIYSSSHRYKGVPSRFSGSGSGTEFTLTISSLQPEDFATYFCQQFKSYPLTFGQGTKLEIK

SEQ ID NO: 1328 - protein, 246 aa, synthetic construct
QVQLVQSGAEVKKPGSSVKVSCKASGHDFRLTYIHWVRQAPGQGLEWMGRIYAGSGNVKYNEKFKGRVTITADTSTSTAYMELSSLRSEDTAVYYCAVSYYSYDVLDYWGQGTTVTVSSGGGGSGGGGSGGGGSGGGGSDIQMTQSPSFLSASVGDRVTITCKASQNVADRVVWHQQKPGKAPKALIYSSSHRYKGVPSRFSGSGSGTEFTLTISSLQPEDFATYFCQQFKSYPLTFGQGTKLEIK

SEQ ID NO: 1329 - protein, 246 aa, synthetic construct
QVQLVQSGAEVKKPGSSVKVSCKASGHDFKLTYIHWVRQAPGQGLEWMGRVSAGSGNTKYNEKFKGRVTITADTSTSTAYMELSSLRSEDTAVYYCAVSYYSYDVLDYWGQGTTVTVSSGGGGSGGGGSGGGGSGGGGSDIQMTQSPSFLSASVGDRVTITCKASQNVGDRVAWHQQKPGKAPKALIYSSSHRYKGVPSRFSGSGSGTEFTLTISSLQPEDFATYFCQQFKSYPLTFGQGTKLEIK

SEQ ID NO: 1330 - protein, 246 aa, synthetic construct
QVQLVQSGAEVKKPGSSVKVSCKASGHDFKLTYIHWVRQAPGQGLEWMGRVSAGSGNTKYNEKFKGRVTITADTSTSTAYMELSSLRSEDTAVYYCAVSYYSYDVLDYWGQGTTVTVSSGGGGSGGGGSGGGGSGGGGSDIQMTQSPSFLSASVGDRVTITCKASQNVDNRVAWHQQKPGKAPKALIYSSSHRYKGVPSRFSGSGSGTEFTLTISSLQPEDFATYFCQQFKSYPLTFGQGTKLEIK

SEQ ID NO: 1331 - protein, 246 aa, synthetic construct
QVQLVQSGAEVKKPGSSVKVSCKASGHDFRLTYIHWVRQAPGQGLEWMGRVSAGSGNVKYNEKFKGRVTITADTSTSTAYMELSSLRSEDTAVYYCAVSYYSYDVLDYWGQGTTVTVSSGGGGSGGGGSGGGGSGGGGSDIQMTQSPSFLSASVGDRVTITCKASQNVADRVVWHQQKPGKAPKALIYSSSHRYKGVPSRFSGSGSGTEFTLTISSLQPEDFATYFCQQFKSYPLTFGQGTKLEIK

SEQ ID NO: 1332 - protein, 246 aa, synthetic construct
QVQLVQSGAEVKKPGSSVKVSCKASGHDFRLTYIHWVRQAPGQGLEWMGRVYAGSGNTKYNEKFKGRVTITADTSTSTAYMELSSLRSEDTAVYYCAVSYYSYDVLDYWGQGTTVTVSSGGGGSGGGGSGGGGSGGGGSDIQMTQSPSFLSASVGDRVTITCKASQNVEDRVVWHQQKPGKAPKALIYSSSHRYKGVPSRFSGSGSGTEFTLTISSLQPEDFATYFCQQFKSYPLTFGQGTKLEIK

SEQ ID NO: 1333 - protein, 246 aa, synthetic construct
QVQLVQSGAEVKKPGSSVKVSCKASGHDFKLTYIHWVRQAPGQGLEWMGRVSAGSGNTKYNEKFKGRVTITADTSTSTAYMELSSLRSEDTAVYYCAVSYYSYDVLDYWGQGTTVTVSSGGGGSGGGGSGGGGSGGGGSDIQMTQSPSFLSASVGDRVTITCKASQNVADRVVWHQQKPGKAPKALIYSSSHRYKGVPSRFSGSGSGTEFTLTISSLQPEDFATYFCQQFKSYPLTFGQGTKLEIK

SEQ ID NO: 1334 - protein, 246 aa, synthetic construct
QVQLVQSGAEVKKPGSSVKVSCKASGHDFKLTYIHWVRQAPGQGLEWMGRISAGSGNTKYNEKFKGRVTITADTSTSTAYMELSSLRSEDTAVYYCAVSYYSYDVLDYWGQGTTVTVSSGGGGSGGGGSGGGGSGGGGSDIQMTQSPSFLSASVGDRVTITCKASQNVGDRVVWHQQKPGKAPKALIYSSSHRYKGVPSRFSGSGSGTEFTLTISSLQPEDFATYFCQQFKSYPLTFGQGTKLEIK

SEQ ID NO: 1335 - protein, 246 aa, synthetic construct
QVQLVQSGAEVKKPGSSVKVSCKASGHDFKLTYIHWVRQAPGQGLEWMGRIYAGSGNTKYNEKFKGRVTITADTSTSTAYMELSSLRSEDTAVYYCAVSYYSYDVLDYWGQGTTVTVSSGGGGSGGGGSGGGGSGGGGSDIQMTQSPSFLSASVGDRVTITCKASQNVGDRVVWHQQKPGKAPKALIYSSSHRYKGVPSRFSGSGSGTEFTLTISSLQPEDFATYFCQQFKSYPLTFGQGTKLEIK

SEQ ID NO: 1336 - protein, 246 aa, synthetic construct
QVQLVQSGAEVKKPGSSVKVSCKASGTDFKLTYIHWVRQAPGQGLEWMGRIFPGSGNVKYNEKFKGRVTITADTSTSTAYMELSSLRSEDTAVYYCAVSYYSYDVLDYWGQGTTVTVSSGGGGSGGGGSGGGGSGGGGSDIQMTQSPSFLSASVGDRVTITCKASQNVDNRVAWYQQKPGKAPKALIYSSSHRYKGVPSRFSGSGSGTEFTLTISSLQPEDFATYFCQQFKSYPLTFGQGTKLEIK

SEQ ID NO: 1337 - protein, 246 aa, synthetic construct
QVQLVQSGAEVKKPGSSVKVSCKASGHDFRLTYIHWVRQAPGQGLEWMGRISAGSGNVKYNEKFKGRVTITADTSTSTAYMELSSLRSEDTAVYYCAVSYYSYDVLDYWGQGTTVTVSSGGGGSGGGGSGGGGSGGGGSDIQMTQSPSFLSASVGDRVTITCKASQNVADRVAWYQQKPGKAPKALIYSSSHRYKGVPSRFSGSGSGTEFTLTISSLQPEDFATYFCQQFKSYPLTFGQGTKLEIK

SEQ ID NO: 1338 - protein, 243 aa, synthetic construct
EVQLVESGGGLVQPGGSLRLSCAASGFTFSNFGMHWVRQAPGKGLEWVSYISSGSSTIYYADTLKGRFTISRDNSKNTLYLQMNSLRAEDTAVYYCARRGEGAMDYWGQGTTVTVSSGGGGSGGGGSGGGGSGGGGSDNQLTQSPSSLSASVGDRVTITCRASSSVNYIYWYQQKPGKAPKLLIYYTSNLAPGVPSRFSGSGSGNDYTLTISSLQPEDFATYYCQQFTSSPFTFGQGTKLEIK

SEQ ID NO: 1339 - protein, 242 aa, synthetic construct
EVQLVESGGGLVQPGGSLRLSCAASGFTFSNFGMHWVRQAPGKGLEWVSYISSGSSTIYYADTLKGRFTISRDNSKNTLYLQMNSLRAEDTAVYYCARRGEGAMDYWGQGTTVTVSSGGGGSGGGGSGGGGSGGGGSSNELTQPPSVSVSPGQTARITCRASSSVNYIYWYQQKSGQAPVLVIYYTSNLAPGIPERFSGSGSGNMYTLTISGAQVEDEADYYCQQFTSSPFTFGTGTKVTVL

SEQ ID NO: 1340 - protein, 243 aa, synthetic construct
QVQLVESGGGVVQPGRSLRLSCAASGFTFSNFGMHWVRQAPGKGLEWVAYISSGSSTIYYADTLKGRFTISRDNSKNTLYLQMNSLRAEDTAVYYCARRGEGAMDYWGQGTTVTVSSGGGGSGGGGSGGGGSGGGGSDNQLTQSPSFLSASVGDRVTITCRASSSVNYIYWYQQKPGKAPKLLIYYTSNLAPGVPSRFSGSGSGNEYTLTISSLQPEDFATYYCQQFTSSPFTFGQGTKLEIK

SEQ ID NO: 1341 - protein, 243 aa, synthetic construct
QVQLVESGGGVVQPGRSLRLSCAASGFTFSNFGMHWVRQAPGKGLEWVAYISSGSSTIYYADTLKGRFTISRDNSKNTLYLQMNSLRAEDTAVYYCARRGEGAMDYWGQGTTVTVSSGGGGSGGGGSGGGGSGGGGSDNQLTQSPSSLSASVGDRVTITCRASSSVNYIYWYQQKPGKAPKLLIYYTSNLAPGVPSRFSGSGSGNDYTLTISSLQPEDFATYYCQQFTSSPFTFGQGTKLEIK

SEQ ID NO: 1342 - protein, 242 aa, synthetic construct
QVQLVESGGGVVQPGRSLRLSCAASGFTFSNFGMHWVRQAPGKGLEWVAYISSGSSTIYYADTLKGRFTISRDNSKNTLYLQMNSLRAEDTAVYYCARRGEGAMDYWGQGTTVTVSSGGGGSGGGGSGGGGSGGGGSSNELTQPPSVSVSPGQTARITCRASSSVNYIYWYQQKSGQAPVLVIYYTSNLAPGIPERFSGSGSGNMYTLTISGAQVEDEADYYCQQFTSSPFTFGTGTKVTVL

SEQ ID NO: 1343 - skipped

SEQ ID NO: 1344 - protein, 119 aa, synthetic construct
QVQLVQSGAEVKKPGSSVKVSCKASGHDFRLTYIHWVRQAPGQGLEWMGRVSAGSGNTKYNEKFKGRVTITADTSTSTAYMELSSLRSEDTAVYYCAVSYYSYDVLDYWGQGTTVTVSS

SEQ ID NO: 1345 - skipped

SEQ ID NO: 1346 - protein, 119 aa, synthetic construct
QVQLVQSGAEVKKPGSSVKVSCKASGHDFRLTYIHWVRQAPGQGLEWMGRVSAGSGNVKYNEKFKGRVTITADTSTSTAYMELSSLRSEDTAVYYCAVSYYSYDVLDYWGQGTTVTVSS

SEQ ID NO: 1347 - protein, 107 aa, synthetic construct
DIQMTQSPSFLSASVGDRVTITCKASQNVGNRVVWHQQKPGKAPKALIYSSSHRYKGVPSRFSGSGSGTEFTLTISSLQPEDFATYFCQQFKSYPLTFGQGTKLEIK

SEQ ID NO: 1348 - protein, 119 aa, synthetic construct
QVQLVQSGAEVKKPGSSVKVSCKASGHDFRLTYIHWVRQAPGQGLEWMGRIYAGSGNVKYNEKFKGRVTITADTSTSTAYMELSSLRSEDTAVYYCAVSYYSYDVLDYWGQGTTVTVSS

SEQ ID NO: 1349 - protein, 107 aa, synthetic construct
DIQMTQSPSFLSASVGDRVTITCKASQNVADRVVWHQQKPGKAPKALIYSSSHRYKGVPSRFSGSGSGTEFTLTISSLQPEDFATYFCQQFKSYPLTFGQGTKLEIK

SEQ ID NO: 1350 - protein, 119 aa, synthetic construct
QVQLVQSGAEVKKPGSSVKVSCKASGHDFKLTYIHWVRQAPGQGLEWMGRVSAGSGNTKYNEKFKGRVTITADTSTSTAYMELSSLRSEDTAVYYCAVSYYSYDVLDYWGQGTTVTVSS

SEQ ID NO: 1351 - protein, 107 aa, synthetic construct; identical to SEQ ID NO: 160

SEQ ID NO: 1352 - skipped

SEQ ID NO: 1353 - protein, 107 aa, synthetic construct; identical to SEQ ID NO: 199

SEQ ID NO: 1354-1355 - skipped (2 entries)

SEQ ID NO: 1356 - protein, 119 aa, synthetic construct
QVQLVQSGAEVKKPGSSVKVSCKASGHDFRLTYIHWVRQAPGQGLEWMGRVYAGSGNTKYNEKFKGRVTITADTSTSTAYMELSSLRSEDTAVYYCAVSYYSYDVLDYWGQGTTVTVSS

SEQ ID NO: 1357 - protein, 107 aa, synthetic construct
DIQMTQSPSFLSASVGDRVTITCKASQNVEDRVVWHQQKPGKAPKALIYSSSHRYKGVPSRFSGSGSGTEFTLTISSLQPEDFATYFCQQFKSYPLTFGQGTKLEIK

SEQ ID NO: 1358-1359 - skipped (2 entries)

SEQ ID NO: 1360 - protein, 119 aa, synthetic construct
QVQLVQSGAEVKKPGSSVKVSCKASGHDFKLTYIHWVRQAPGQGLEWMGRISAGSGNTKYNEKFKGRVTITADTSTSTAYMELSSLRSEDTAVYYCAVSYYSYDVLDYWGQGTTVTVSS

SEQ ID NO: 1361 - protein, 107 aa, synthetic construct
DIQMTQSPSFLSASVGDRVTITCKASQNVGDRVVWHQQKPGKAPKALIYSSSHRYKGVPSRFSGSGSGTEFTLTISSLQPEDFATYFCQQFKSYPLTFGQGTKLEIK

SEQ ID NO: 1362 - protein, 119 aa, synthetic construct
QVQLVQSGAEVKKPGSSVKVSCKASGHDFKLTYIHWVRQAPGQGLEWMGRIYAGSGNTKYNEKFKGRVTITADTSTSTAYMELSSLRSEDTAVYYCAVSYYSYDVLDYWGQGTTVTVSS

SEQ ID NO: 1363-1364 - skipped (2 entries)

SEQ ID NO: 1365 - protein, 107 aa, synthetic construct
DIQMTQSPSFLSASVGDRVTITCRASQNVDNRLGWHQQKPGKAPKALIYSSSHRYKGVPSRFSGSGSGTEFTLTISSLQPEDFATYFCQQFKSYPLTFGQGTKLEIK

SEQ ID NO: 1366 - skipped

SEQ ID NO: 1367 - protein, 107 aa, synthetic construct
DIQMTQSPSFLSASVGDRVTITCKASQNVDNRVAWHQQKPGKAPKALIYAASSLQKGVPSRFSGSGSGTEFTLTISSLQPEDFATYFCQQFKSYPLTFGQGTKLEIK

SEQ ID NO: 1368 - skipped

SEQ ID NO: 1369 - protein, 107 aa, synthetic construct
DIQMTQSPSFLSASVGDRVTITCKASQNVDNRVAWHQQKPGKAPKALIYSSSHRYKGVPSRFSGSGSGTEFTLTISSLQPEDFATYFCLQHNSYPLTFGQGTKLEIK

SEQ ID NO: 1370 - protein, 119 aa, synthetic construct
QVQLVQSGAEVKKPGSSVKVSCKASGHDFKLTYIHWVRQAPGQGLEWMGRVSAGSGNVNYAQKFQGRVTITADTSTSTAYMELSSLRSEDTAVYYCAVSYYSYDVLDYWGQGTTVTVSS

SEQ ID NO: 1371-2169 - skipped (799 entries)

SEQ ID NO: 2170 - protein, 114 aa, Homo sapiens
NWVNVISDLKKIEDLIQSMHIDATLYTESDVHPSCKVTAMKCFLLELQVISLESGDASIHDTVENLIILANNSLSSNGNVTESGCKECEELEEKNIKEFLQSFVHIVQMFINTS

SEQ ID NO: 2171-2179 - skipped (9 entries)

SEQ ID NO: 2180 - protein, 77 aa, synthetic construct
MAPRRARGCRTLGLPALLLLLLLRPPATRGITCPPPMSVEHADIWVKSYSLYSRERYICNSGFKRKAGTSSLTECVL

SEQ ID NO: 2181-2189 - skipped (9 entries)

SEQ ID NO: 2190 - protein, 20 aa, synthetic construct
SGGSGGGGSGGGSGGGGSLQ

SEQ ID NO: 2191 - protein, 133 aa, Homo sapiens [sequence omitted]

SEQ ID NO: 2192 - protein, 157 aa, Homo sapiens
YFGKLESKLSVIRNLNDQVLFIDQGNRPLFEDMTDSDCRDNAPRTIFIISMYKDSQPRGMAVTISVKCEKISTLSCENKIISFKEMNPPDNIKDTKSDIIFFQRSVPGHDNKMQFESSSYEGYFLACEKERDLFKLILKKEDELGDRSIMFTVQNED

SEQ ID NO: 2193 - protein, 133 aa, Homo sapiens [sequence omitted]

SEQ ID NO: 2194 - protein, 138 aa, Homo sapiens
QDPYVKEAENLKKYFNAGHSDVADNGTLFLGILKNWKEESDRKIMQSQIVSFYFKLFKNFKDDQSIQKSVETIKEDMNVKFFNSNKKKRDDFEKLTNYSVTDLNVQRKAIHELIQVMAELSPAAKTGKRKRSQMLFRG

SEQ ID NO: 2195-2269 - skipped (75 entries)

SEQ ID NO: 2270 - protein, 133 aa, synthetic construct
APTSSSTKKTQLQLEHLLLDLQMILNGINNYKNPKLTRMLTFKFYMPKKATELKHLQCLEEELKPLEEVLNLAQSKNFHLRPRDLISNINVIVLELKGSETTFMCEYADETATIVEFLNRWITFAQSIISTLT

SEQ ID NO: 2271-2279 - skipped (9 entries)

SEQ ID NO: 2280 - protein, 133 aa, synthetic construct
APASSSTKKTQLQLEHLLLDLQMILNGINNYKNPKLTRMLTAKFAMPKKATELKHLQCLEEELKPLEEVLNGAQSKNFHLRPRDLISNINVIVLELKGSETTFMCEYADETATIVEFLNRWITFAQSIISTLT

SEQ ID NO: 2281-2289 - skipped (9 entries)

SEQ ID NO: 2290 - protein, 518 aa, synthetic construct
IWELKKDVYVVELDWYPDAPGEMVVLTCDTPEEDGITWTLDQSSEVLGSGKTLTIQVKEFGDAGQYTCHKGGEVLSHSLLLLHKKEDGIWSTDILKDQKEPKNKTFLRCEAKNYSGRFTCWWLTTISTDLTFSVKSSRGSSDPQGVTCGAATLSAERVRGDNKEYEYSVECQEDSACPAAEESLPIEVMVDAVHKLKYENYTSSFFIRDIIKPDPPKNLQLKPLKNSRQVEVSWEYPDTWSTPHSYFSLTFCVQVQGKSKREKKDRVFTDKTSATVICRKNASISVRAQDRYYSSSWSEWASVPCSGGGGSGGGGSGGGGSRNLPVATPDPGMFPCLHHSQNLLRAVSNMLQKARQTLEFYPCTSEEIDHEDITKDKTSTVEACLPLELTKNESCLNSRETSFITNGSCLASRKTSFMMALCLSSIYEDLKMYQVEFKTMNAKLLMDPKRQIFLDQNMLAVIDELMQALNFNSETVPQKSSLEEPDFYKTKIKLCILLHAFRIRAVTIDRVMSYLNAS

SEQ ID NO: 2291-2299 - skipped (9 entries)

SEQ ID NO: 2300 - protein, 340 aa, synthetic construct
SPGQGTQSENSCTHFPGNLPNMLRDLRDAFSRVKTFFQMKDQLDNLLLKESLLEDFKGYLGCQALSEMIQFYLEEVMPQAENQDPDIKAHVNSLGENLKTLRLRLRRCHRFLPCENKSKAVEQVKNAFNKLQEKGIYKAMSEFDIFINYIEAYMTMKIRNGGGGSGGGGSGGGGSGGGGSSPGQGTQSENSCTHFPGNLPNMLRDLRDAFSRVKTFFQMKDQLDNLLLKESLLEDFKGYLGCQALSEMIQFYLEEVMPQAENQDPDIKAHVNSLGENLKTLRLRLRRCHRFLPCENKSKAVEQVKNAFNKLQEKGIYKAMSEFDIFINYIEAYMTMKIRN

SEQ ID NO: 2301-2309 - skipped (9 entries)

SEQ ID NO: 2310 - protein, 166 aa, synthetic construct
SPGQGTQSENSCTHFPGNLPNMLRDLRDAFSRVKTFFQMKDQLDNLLLKESLLEDFKGYLGCQALSEMIQFYLEEVMPQAENQDPDIKAHVNSLGENLKTLRLRLRRCHRFLPCENGGGSGGKSKAVEQVKNAFNKLQEKGIYKAMSEFDIFINYIEAYMTMKIRN

SEQ ID NO: 2311-2319 - skipped (9 entries)

SEQ ID NO: 2320 - protein, 114 aa, synthetic construct
NWVNVISDLKKIEDLIQSMHIDATLYTESDVHPSCKVTAMKCFLLELQVISLASGDASIHDTVENLIILANNSLSSNGAVTESGCKECEELEEKNIKEFLQSFVHIVQMFINTS

SEQ ID NO: 2321-2999 - skipped (679 entries)

SEQ ID NO: 3000 - protein, 107 aa, synthetic construct
DIQMTQSPSFLSASVGDRVTITCSASQGISNYLNWYQQKPGKAVKLLIYYTSSLHSGVPSRFSGSGSGTEYTLTISSLQPEDFATYYCQQYSKLPRTFGGGTKVEIK

SEQ ID NO: 3001 - protein, 107 aa, synthetic construct
DIQMTQSPSSLSASVGDRVTITCSASQGISNYLNWYQQKPGKAVKLLIYYTSSLHSGVPSRFSGSGSGTDYTLTISSLQPEDFATYYCQQYSKLPRTFGGGTKVEIK

SEQ ID NO: 3002 - protein, 107 aa, synthetic construct
DIQMTQSPSSLSASVGDRVTITCSASQGISNYLNWYQQKPGKVVKLLIYYTSSLHSGVPSRFSGSGSGTDYTLTISSLQPEDVATYYCQQYSKLPRTFGGGTKVEIK

SEQ ID NO: 3003 - protein, 107 aa, synthetic construct
DIQMTQSPSSLSASVGDRVTITCSASQGISNYLNWYQQKPGQAVKLLIYYTSSLHSGVPSRFSGSGSGTDYTLTISSLQPEDVATYYCQQYSKLPRTFGGGTKVEIK

SEQ ID NO: 3004 - protein, 107 aa, synthetic construct
DIQMTQSPSSLSASVGDRVTITCSASQGISNYLNWYQQKPGKAVKLLIYYTSSLHSGVPSRFSGSGSGTDYTFTISSLQPEDIATYYCQQYSKLPRTFGGGTKVEIK

SEQ ID NO: 3005 - protein, 107 aa, synthetic construct
DIQMTQSPSSLSASVGDRVTITCSASQGISNYLNWYQQKPGKTVKLLIYYTSSLHSGIPSRFSGSGSGTDYTLTIRSLQPEDFATYYCQQYSKLPRTFGGGTKVEIK

SEQ ID NO: 3006 - protein, 107 aa, synthetic construct
AIQMTQSPSSLSASVGDRVTITCSASQGISNYLNWYQQKPGKAVKLLIYYTSSLHSGVPSRFSGSGSGTDYTLTISSLQPEDFATYYCQQYSKLPRTFGGGTKVEIK

SEQ ID NO: 3007 - protein, 107 aa, synthetic construct
DIQMTQSPSSVSASVGDRVTITCSASQGISNYLNWYQQKPGKAVKLLIYYTSSLHSGVPSRFSGSGSGTDYTLTISSLQPEDFATYYCQQYSKLPRTFGGGTKVEIK

SEQ ID NO: 3008 - protein, 107 aa, synthetic construct
DIQMTQSPSSLSASVGDRVTITCSASQGISNYLNWYQQKPGKAVKRLIYYTSSLHSGVPSRFSGSGSGTEYTLTISNLQPEDFATYYCQQYSKLPRTFGGGTKVEIK

SEQ ID NO: 3009 - protein, 107 aa, synthetic construct
AIRMTQSPFSLSASVGDRVTITCSASQGISNYLNWYQQKPAKAVKLFIYYTSSLHSGVPSRFSGSGSGTDYTLTISSLQPEDFATYYCQQYSKLPRTFGGGTKVEIK

SEQ ID NO: 3010 - protein, 107 aa, synthetic construct
DIQMTQSPSSLSASVGDRVTITCSASQGISNYLNWYQQKPGKAVKRLIYYTSSLHSGVPSRFSGSGSGTEYTLTISSLQPEDFATYYCQQYSKLPRTFGGGTKVEIK

SEQ ID NO: 3011 - protein, 107 aa, synthetic construct
DIQMTQSPSTLSASVGDRVTITCSASQGISNYLNWYQQKPGKAVKLLIYYTSSLHSGVPSRFSGSGSGTEYTLTISSLQPDDFATYYCQQYSKLPRTFGGGTKVEIK

SEQ ID NO: 3012 - protein, 107 aa, synthetic construct
DIQMTQSPSSLSASVGDRVTITCSASQGISNYLNWYQQKPGKAVKSLIYYTSSLHSGVPSRFSGSGSGTDYTLTISSLQPEDFATYYCQQYSKLPRTFGGGTKVEIK

SEQ ID NO: 3013 - protein, 107 aa, synthetic construct
DIQMTQSPSSLSASVGDRVTITCSASQGISNYLNWYQQKPGKAVKSLIYYTSSLHSGVPSKFSGSGSGTDYTLTISSLQPEDFATYYCQQYSKLPRTFGGGTKVEIK

SEQ ID NO: 3014 - protein, 107 aa, synthetic construct
DIQMTQSPSSLSASVGDRVTITCSASQGISNYLNWYQQKPEKAVKSLIYYTSSLHSGVPSRFSGSGSGTDYTLTISSLQPEDFATYYCQQYSKLPRTFGGGTKVEIK

SEQ ID NO: 3015 - protein, 107 aa, synthetic construct
DIQMTQSPSAMSASVGDRVTITCSASQGISNYLNWYQQKPGKVVKRLIYYTSSLHSGVPSRFSGSGSGTEYTLTISSLQPEDFATYYCQQYSKLPRTFGGGTKVEIK

SEQ ID NO: 3016 - protein, 107 aa, synthetic construct
DIVMTQSPDSLAVSLGERATINCSASQGISNYLNWYQQKPGQPVKLLIYYTSSLHSGVPDRFSGSGSGTDYTLTISSLQAEDVAVYYCQQYSKLPRTFGGGTKVEIK

SEQ ID NO: 3017 - protein, 107 aa, synthetic construct
EIVMTQSPGTLSLSPGERATLSCSASQGISNYLNWYQQKPGQAVKLLIYYTSSLHSGIPDRFSGSGSGTDYTLTISRLEPEDFAVYYCQQYSKLPRTFGGGTKVEIK

SEQ ID NO: 3018 - protein, 107 aa, synthetic construct
EIVMTQSPPTLSLSPGERVTLSCSASQGISNYLNWYQQKPGQAVKLLIYYTSSLHSGIPARFSGSGSGTDYTLTISSLQPEDFAVYYCQQYSKLPRTFGGGTKVEIK

SEQ ID NO: 3019 - protein, 107 aa, synthetic construct
EIVMTQSPPTLSLSPGERVTLSCSASQGISNYLNWYQQKPGQAVKLLIYYTSSLHSSIPARFSGSGSGTDYTLTISSLQPEDFAVYYCQQYSKLPRTFGGGTKVEIK

SEQ ID NO: 3020 - protein, 107 aa, synthetic construct
EIVMTQSPATLSLSPGERATLSCSASQGISNYLNWYQQKPGQAVKLLIYYTSSLHSGIPARFSGSGSGTDYTLTISSLEPEDFAVYYCQQYSKLPRTFGGGTKVEIK

SEQ ID NO: 3021 - protein, 107 aa, synthetic construct
EIVMTQSPATLSLSPGERATLSCSASQGISNYLNWYQQKPGQAVKLLIYYTSSLHSGIPARFSGSGSGTDYTLTISRLEPEDFAVYYCQQYSKLPRTFGGGTKVEIK

SEQ ID NO: 3022 - protein, 107 aa, synthetic construct
EIVMTQSPATLSLSPGERATLSCSASQGISNYLNWYQQKPGQAVKLLIYYTSSLHSGIPDRFSGSGSGTDYTLTISRLEPEDFAVYYCQQYSKLPRTFGGGTKVEIK

SEQ ID NO: 3023 - protein, 107 aa, synthetic construct
EIVMTQSPATLSLSPGERATLSCSASQGISNYLNWYQQKPGLAVKLLIYYTSSLHSGIPDRFSGSGSGTDYTLTISRLEPEDFAVYYCQQYSKLPRTFGGGTKVEIK

SEQ ID NO: 3024 - protein, 107 aa, synthetic construct
DIQMIQSPSFLSASVGDRVSIICSASQGISNYLNWYLQKPGKSVKLFIYYTSSLHSGVSSRFSGRGSGTDYTLTIISLKPEDFAAYYCQQYSKLPRTFGGGTKVEIK

SEQ ID NO: 3025 - protein, 107 aa, synthetic construct
EIVMTQSPATLSLSPGERATLSCSASQGISNYLNWYQQKPGQAVKLLIYYTSSLHSGIPARFSGSGSGTDYTLTISSLQPEDFAVYYCQQYSKLPRTFGGGTKVEIK

SEQ ID NO: 3026 - protein, 107 aa, synthetic construct
EIVMTQSPATLSLSPGERATLSCSASQGISNYLNWYQQKPGQAVKLLIYYTSSLHSGIPARFSGSGPGTDYTLTISSLEPEDFAVYYCQQYSKLPRTFGGGTKVEIK

SEQ ID NO: 3027 - protein, 107 aa, synthetic construct
DIVMTQTPLSLSVTPGQPASISCSASQGISNYLNWYLQKPGQSVKLLIYYTSSLHSGVPDRFSGSGSGTDYTLKISRVEAEDVGVYYCQQYSKLPRTFGGGTKVEIK

SEQ ID NO: 3028 - protein, 107 aa, synthetic construct
DIVMTQTPLSLSVTPGQPASISCSASQGISNYLNWYLQKPGQPVKLLIYYTSSLHSGVPDRFSGSGSGTDYTLKISRVEAEDVGVYYCQQYSKLPRTFGGGTKVEIK

SEQ ID NO: 3029 - protein, 107 aa, synthetic construct
DIVMTQSPAFLSVTPGEKVTITCSASQGISNYLNWYQQKPDQAVKLLIYYTSSLHSGVPSRFSGSGSGTDYTFTISSLEAEDAATYYCQQYSKLPRTFGGGTKVEIK

SEQ ID NO: 3030 - protein, 107 aa, synthetic construct
DIVMTQSPLSLPVTPGEPASISCSASQGISNYLNWYLQKPGQSVKLLIYYTSSLHSGVPDRFSGSGSGTDYTLKISRVEAEDVGVYYCQQYSKLPRTFGGGTKVEIK

SEQ ID NO: 3031 - protein, 107 aa, synthetic construct
DIVMTQTPLSLPVTPGEPASISCSASQGISNYLNWYLQKPGQSVKLLIYYTSSLHSGVPDRFSGSGSGTDYTLKISRVEAEDVGVYYCQQYSKLPRTFGGGTKVEIK

SEQ ID NO: 3032 - protein, 107 aa, synthetic construct
EIVMTQSPATLSVSPGERATLSCSASQGISNYLNWYQQKPGQAVKLLIYYTSSLHSGIPARFSGSGSGTEYTLTISILQSEDFAVYYCQQYSKLPRTFGGGTKVEIK

SEQ ID NO: 3033 - protein, 107 aa, synthetic construct
EIVMTQSPATLSVSPGERATLSCSASQGISNYLNWYQQKPGQAVKLLIYYTSSLHSGIPARFSGSGSGTEYTLTISSLQSEDFAVYYCQQYSKLPRTFGGGTKVEIK

SEQ ID NO: 3034 - protein, 107 aa, synthetic construct
DIVMTQSPLSLPVTLGQPASISCSASQGISNYLNWYQQRPGQSVKRLIYYTSSLHSGVPDRFSGSGSGTDYTLKISRVEAEDVGVYYCQQYSKLPRTFGGGTKVEIK

SEQ ID NO: 3035 - protein, 107 aa, synthetic construct
EITMTQSPAFMSATPGDKVNISCSASQGISNYLNWYQQKPGEAVKFIIYYTSSLHSGIPPRFSGSGYGTDYTLTINNIESEDAAYYYCQQYSKLPRTFGGGTKVEIK

SEQ ID NO: 3036 - protein, 107 aa, synthetic construct
DIVMTQTPLSSPVTLGQPASISCSASQGISNYLNWYQQRPGQPVKLLIYYTSSLHSGVPDRFSGSGAGTDYTLKISRVEAEDVGVYYCQQYSKLPRTFGGGTKVEIK

SEQ ID NO: 3037 - protein, 107 aa, synthetic construct
EIVMTQSPDFQSVTPKEKVTITCSASQGISNYLNWYQQKPDQSVKLLIYYTSSLHSGVPSRFSGSGSGTDYTLTINSLEAEDAATYYCQQYSKLPRTFGGGTKVEIK

SEQ ID NO: 3038 - protein, 107 aa, synthetic construct
EIVMTQTPLSLSITPGEQASISCSASQGISNYLNWYLQKARPVVKLLIYYTSSLHSGVPDRFSGSGSGTDYTLKISRVEAEDFGVYYCQQYSKLPRTFGGGTKVEIK

SEQ ID NO: 3039 - protein, 107 aa, synthetic construct
EIVMTQTPLSLSITPGEQASMSCSASQGISNYLNWYLQKARPVVKLLIYYTSSLHSGVPDRFSGSGSGTDYTLKISRVEAEDFGVYYCQQYSKLPRTFGGGTKVEIK

SEQ ID NO: 3040 - protein, 120 aa, synthetic construct
QVTLKESGPVLVKPTETLTLTCTVSGFSLTAYGVNWVRQPPGKALEWLGMIWGDGNTDYNSALKSRLTISKDNSKSQVVLTMTNMDPVDTATYYCARDRVTATLYAMDYWGQGTLVTVSS

SEQ ID NO: 3041 - protein, 120 aa, synthetic construct
QVTLKESGPALVKPTETLTLTCTVSGFSLTAYGVNWVRQPPGKALEWLGMIWGDGNTDYNSALKSRLIISKDNSKSQVVLTMTNMDPVDTATYYCARDRVTATLYAMDYWGQGTLVTVSS

SEQ ID NO: 3042 - protein, 120 aa, synthetic construct
QVTLKESGPALVKPTQTLTLTCTVSGFSLTAYGVNWVRQPPGKALEWLGMIWGDGNTDYNSALKSRLTISKDNSKSQVVLTMTNMDPVDTATYYCARDRVTATLYAMDYWGQGTLVTVSS

SEQ ID NO: 3043 - protein, 120 aa, synthetic construct
QVQLQESGPGLVKPSGTLSLTCAVSGFSLTAYGVNWVRQPPGKGLEWLGMIWGDGNTDYNSALKSRLTISKDNSKSQVSLKLSSVTAADTAVYYCARDRVTATLYAMDYWGQGTLVTVSS

SEQ ID NO: 3044 - protein, 120 aa, synthetic construct
QVTLKESGPTLVKPTQTLTLTCTVSGFSLTAYGVNWVRQPPGKALEWLGMIWGDGNTDYNSALKSRLTITKDNSKSQVVLTMTNMDPVDTATYYCARDRVTATLYAMDYWGQGTLVTVSS

SEQ ID NO: 3045 - protein, 120 aa, synthetic construct
QVTLKESGPALVKPTQTLTLTCTVSGFSLTAYGVNWVRQPPGKALEWLGMIWGDGNTDYNSALKSRLTITKDNSKSQVVLTMTNMDPVDTATYYCARDRVTATLYAMDYWGQGTLVTVSS

SEQ ID NO: 3046 - protein, 120 aa, synthetic construct
QVQLQESGPGLVKPSQTLSLTCTVSGFSLTAYGVNWVRQPPGKGLEWLGMIWGDGNTDYNSALKSRLTISKDNSKSQVSLKLSSVTAADTAVYYCARDRVTATLYAMDYWGQGTLVTVSS

SEQ ID NO: 3047 - protein, 120 aa, synthetic construct
QVQLQESGPGLVKPSETLSLTCTVSGFSLTAYGVNWVRQPPGKGLEWLGMIWGDGNTDYNSALKSRLTISKDNSKSQVSLKLSSVTAADTAVYYCARDRVTATLYAMDYWGQGTLVTVSS

SEQ ID NO: 3048 - protein, 120 aa, synthetic construct
QVQLQESGPGLVKPSQTLSLTCAVSGFSLTAYGVNWVRQPPGKGLEWLGMIWGDGNTDYNSALKSRLTISKDNSKSQVSLKLSSVTAADTAVYYCARDRVTATLYAMDYWGQGTLVTVSS

SEQ ID NO: 3049 - protein, 120 aa, synthetic construct
QVQLQESGPGLVKPSDTLSLTCTVSGFSLTAYGVNWVRQPPGKGLEWLGMIWGDGNTDYNSALKSRLTISKDNSKSQVSLKLSSVTAADTAVYYCARDRVTATLYAMDYWGQGTLVTVSS

SEQ ID NO: 3050 - protein, 120 aa, synthetic construct
QVQLQESGPGLVKPSQTLSLTCTVSGFSLTAYGVNWVRQHPGKGLEWLGMIWGDGNTDYNSALKSRLTISKDNSKSQVSLKLSSVTAADTAVYYCARDRVTATLYAMDYWGQGTLVTVSS

SEQ ID NO: 3051 - protein, 120 aa, synthetic construct
QVQLQESGPGLVKPSQTLSLTCTVSGFSLTAYGVNWVRQPAGKGLEWLGMIWGDGNTDYNSALKSRLTISKDNSKSQVSLKLSSVTAADTAVYYCARDRVTATLYAMDYWGQGTLVTVSS

SEQ ID NO: 3052 - protein, 120 aa, synthetic construct
QVQLQESGPGLVKPSQTLSLTCAVSGFSLTAYGVNWVRQPPGKGLEWLGMIWGDGNTDYNSALKSRLTISKDNSKSQVSLKLSSVTAVDTAVYYCARDRVTATLYAMDYWGQGTLVTVSS

SEQ ID NO: 3053 - protein, 120 aa, synthetic construct
QVQLQESGPGLVKPSETLSLTCTVSGFSLTAYGVNWVRQPPGKGLEWLGMIWGDGNTDYNSALKSRLTISKDNSKSHVSLKLSSVTAADTAVYYCARDRVTATLYAMDYWGQGTLVTVSS

SEQ ID NO: 3054 - protein, 120 aa, synthetic construct
QVQLQESGPGLVKPSETLSLTCAVSGFSLTAYGVNWVRQPPGKGLEWLGMIWGDGNTDYNSALKSRLTISKDNSKSQVSLKLSSVTAADTAVYYCARDRVTATLYAMDYWGQGTLVTVSS

SEQ ID NO: 3055 - protein, 120 aa, synthetic construct
QVQLQESGPGLVKPSQTLSLTCAVYGFSLTAYGVNWVRQPPGKGLEWLGMIWGDGNTDYNSALKSRLTISKDNSKSQVSLKLSSVTAADTAVYYCARDRVTATLYAMDYWGQGTLVTVSS

SEQ ID NO: 3056 - protein, 120 aa, synthetic construct
RVQLQESGPGLVKPSETLSLTCTVSGFSLTAYGVNWVRQPPGKGLEWLGMIWGDGNTDYNSALKSRLTISKDNSKSQVPLKLSSVTAADTAVYYCARDRVTATLYAMDYWGQGTLVTVSS

SEQ ID NO: 3057 - protein, 120 aa, synthetic construct
QVQLQESGPGLVKPSQTLSLTCTVSGFSLTAYGVNWVRQHPGKGLEWLGMIWGDGNTDYNSALKSLLTISKDNSKSQVSLKLSSVTAADTAVYYCARDRVTATLYAMDYWGQGTLVTVSS

SEQ ID NO: 3058 - protein, 120 aa, synthetic construct
QVQLQESGPGLVKPSDTLSLTCAVSGFSLTAYGVNWVRQPPGKGLEWLGMIWGDGNTDYNSALKSRLTISKDNSKSQVSLKLSSVTALDTAVYYCARDRVTATLYAMDYWGQGTLVTVSS

SEQ ID NO: 3059 - protein, 120 aa, synthetic construct
QVQLQESGPGLVKPSDTLSLTCAVSGFSLTAYGVNWVRQPPGKGLEWLGMIWGDGNTDYNSALKSRLTISKDNSKSQVSLKLSSVTAVDTAVYYCARDRVTATLYAMDYWGQGTLVTVSS

SEQ ID NO: 3060 - protein, 120 aa, synthetic construct
QVQLQESGSGLVKPSQTLSLTCAVSGFSLTAYGVNWVRQPPGKGLEWLGMIWGDGNTDYNSALKSRLTISKDNSKSQVSLKLSSVTAADTAVYYCARDRVTATLYAMDYWGQGTLVTVSS

SEQ ID NO: 3061 - protein, 120 aa, synthetic construct
EVQLVESGGGLVQPGRSLRLSCTVSGFSLTAYGVNWVRQAPGKGLEWLGMIWGDGNTDYNSALKSRLTISKDNSKSIVYLQMNSLKTEDTAVYYCARDRVTATLYAMDYWGQGTLVTVSS

SEQ ID NO: 3062 - protein, 120 aa, synthetic construct
EVQLVESGGGLVQPGPSLRLSCTVSGFSLTAYGVNWVRQAPGKGLEWLGMIWGDGNTDYNSALKSRLTISKDNSKSIVYLQMNSLKTEDTAVYYCARDRVTATLYAMDYWGQGTLVTVSS

SEQ ID NO: 3063 - protein, 120 aa, synthetic construct
QVQLQESGSGLVKPSQTLSLTCAVSGFSLTAYGVNWVRQSPGKGLEWLGMIWGDGNTDYNSALKSRLTISKDNSKSQVSLKLSSVTAADTAVYYCARDRVTATLYAMDYWGQGTLVTVSS

SEQ ID NO: 3064 - protein, 120 aa, synthetic construct
QVQLQESGPGLVKPSETLSLTCTVSGFSLTAYGVNWVRQPAGKGLEWLGMIWGDGNTDYNSALKSRLTISKDNSKSQVSLKLSSVTAADTAVYYCARDRVTATLYAMDYWGQGTLVTVSS

SEQ ID NO: 3065 - protein, 120 aa, synthetic construct
EVQLVESGGGLVKPGRSLRLSCTVSGFSLTAYGVNWVRQAPGKGLEWLGMIWGDGNTDYNSALKSRLTISKDNSKSIVYLQMNSLKTEDTAVYYCARDRVTATLYAMDYWGQGTLVTVSS

SEQ ID NO: 3066 - protein, 120 aa, synthetic construct
QVQLQESGPGLVKPSETLSLTCAVYGFSLTAYGVNWVRQPPGKGLEWLGMIWGDGNTDYNSALKSRLTISKDNSKSQVYLKLSSVTAADTAVYYCARDRVTATLYAMDYWGQGTLVTVSS

SEQ ID NO: 3067 - protein, 120 aa, synthetic construct
QVQLQESGPGLVKPSDTLSLTCAVSGFSLTAYGVNWVRQPPGKGLEWLGMIWGDGNTDYNSALKSRLTISKDNSKSQVSLKLSSVTAVDTGVYYCARDRVTATLYAMDYWGQGTLVTVSS

SEQ ID NO: 3068 - protein, 120 aa, synthetic construct
EVQLVESGGGLVQPGGSLRLSCAVSGFSLTAYGVNWVRQAPGKGLEWLGMIWGDGNTDYNSALKSRLTISKDNSKSSVYLQMNSLKTEDTAVYYCARDRVTATLYAMDYWGQGTLVTVSS

SEQ ID NO: 3069 - protein, 120 aa, synthetic construct
EVQLVESGGGLVKPGGSLRLSCAVSGFSLTAYGVNWVRQAPGKGLEWLGMIWGDGNTDYNSALKSRLTISKDNSKSTVYLQMNSLKTEDTAVYYCARDRVTATLYAMDYWGQGTLVTVSS

SEQ ID NO: 3070 - protein, 120 aa, synthetic construct
QVQLQQSGPGLVKPSQTLSLTCAVSGFSLTAYGVNWVRQSPSRGLEWLGMIWGDGNTDYNSALKSRLTINKDNSKSQVSLQLNSVTPEDTAVYYCARDRVTATLYAMDYWGQGTLVTVSS

SEQ ID NO: 3071 - protein, 120 aa, synthetic construct
QVQLVESGGGLVQPGGSLRLSCSVSGFSLTAYGVNWVRQAPGKGLEWLGMIWGDGNTDYNSALKSRLTISKDNSKSTVYLQMNSLRAEDTAVYYCARDRVTATLYAMDYWGQGTLVTVSS

SEQ ID NO: 3072 - protein, 120 aa, synthetic construct
QVQLQQWGAGLLKPSETLSLTCAVYGFSLTAYGVNWVRQPPGKGLEWLGMIWGDGNTDYNSALKSRLTISKDNSKSQVSLKLSSVTAADTAVYYCARDRVTATLYAMDYWGQGTLVTVSS

SEQ ID NO: 3073 - protein, 120 aa, synthetic construct
QVQLVESGGGVVQPGRSLRLSCAVSGFSLTAYGVNWVRQAPGKGLEWLGMIWGDGNTDYNSALKSRLTISKDNSTSTVFLQMNSLRAEDTAVYYCARDRVTATLYAMDYWGQGTLVTVSS

SEQ ID NO: 3074 - protein, 120 aa, synthetic construct
EVQLVESGGGLVQPGGSLRLSCAVSGFSLTAYGVNWVRQAPGKGLEWLGMIWGDGNTDYNSALKSRLTISKDNSKSTVYLQMNSLRAEDTAVYYCARDRVTATLYAMDYWGQGTLVTVSS

SEQ ID NO: 3075 - protein, 120 aa, synthetic construct
EVQLVESGGGLVQPGGSLRLSCAVSGFSLTAYGVNWVRQAPGKGLEWLGMIWGDGNTDYNSALKSRLTISKDNAKSSVYLQMNSLRDEDTAVYYCARDRVTATLYAMDYWGQGTLVTVSS

SEQ ID NO: 3076 - protein, 120 aa, synthetic construct
EVQLLESGGGLVQPGGSLRLSCAVSGFSLTAYGVNWVRQAPGKGLEWLGMIWGDGNTDYNSALKSRLTISKDNSKSTVYLQMNSLRAEDTAVYYCARDRVTATLYAMDYWGQGTLVTVSS

SEQ ID NO: 3077 - protein, 120 aa, synthetic construct
QVQLVESGGGLVKPGGSLRLSCAVSGFSLTAYGVNWVRQAPGKGLEWLGMIWGDGNTDYNSALKSRLTISKDNAKSSVYLQMNSLRAEDTAVYYCARDRVTATLYAMDYWGQGTLVTVSS

SEQ ID NO: 3078 - protein, 120 aa, synthetic construct
EVQLVESGGGLVQPGGSLKLSCAVSGFSLTAYGVNWVRQASGKGLEWLGMIWGDGNTDYNSALKSRLTISKDNSKSTVYLQMNSLKTEDTAVYYCARDRVTATLYAMDYWGQGTLVTVSS

SEQ ID NO: 3079 - protein, 120 aa, synthetic construct
QVQLLESGGGLVKPGGSLRLSCAVSGFSLTAYGVNWVRQAPGKGLEWLGMIWGDGNTDYNSALKSRLTISKDNAKSSVYLQMNSLRAEDTAVYYCARDRVTATLYAMDYWGQGTLVTVSS

SEQ ID NO: 3080 - protein, 120 aa, synthetic construct
QVQLVESGGGVVQPGRSLRLSCAVSGFSLTAYGVNWVRQAPGKGLEWLGMIWGDGNTDYNSALKSRLTISKDNSKSTVYLQMNSLRAEDTAVYYCARDRVTATLYAMDYWGQGTLVTVSS

SEQ ID NO: 3081 - protein, 120 aa, synthetic construct
QVQLVESGGGVVQPGRSLRLSCAVSGFSLTAYGVNWVRQAPGKGLEWLGMIWGDGNTDYNSALKSRLTISKDNSKSRVYLQMNSLRAEDTAVYYCARDRVTATLYAMDYWGQGTLVTVSS

SEQ ID NO: 3082 - protein, 120 aa, synthetic construct
QVQLVESGGGVVQPGRSLRLSCAVSGFSLTAYGVNWVRQAPGKGLEWLGMIWGDGNTDYNSALKSRLAISKDNSKSTVYLQMNSLRAEDTAVYYCARDRVTATLYAMDYWGQGTLVTVSS

SEQ ID NO: 3083 - protein, 120 aa, synthetic construct
QVQLVESGGGVVQPGGSLRLSCAVSGFSLTAYGVNWVRQAPGKGLEWLGMIWGDGNTDYNSALKSRLTISKDNSKSTVYLQMNSLRAEDTAVYYCARDRVTATLYAMDYWGQGTLVTVSS

SEQ ID NO: 3084 - protein, 120 aa, synthetic construct
EVQLVESGGGLVQPGGSLRLSCAVSGFSLTAYGVNWVRQAPGKGLEWLGMIWGDGNTDYNSALKSRLTISKDNAKSTVYLQMNSLRAEDTAVYYCARDRVTATLYAMDYWGQGTLVTVSS

SEQ ID NO: 3085 - protein, 120 aa, synthetic construct
EVQLVESGGGLVQPGGSLRLSCAVSGFSLTAYGVNWVRQAPGKGLEWLGMIWGDGNTDYNSALKSRLTISKDNAKSSVYLQMNSLRAEDTAVYYCARDRVTATLYAMDYWGQGTLVTVSS

SEQ ID NO: 3086 - protein, 120 aa, synthetic construct
EVQLVESGGVVVQPGGSLRLSCAVSGFSLTAYGVNWVRQAPGKGLEWLGMIWGDGNTDYNSALKSRLTISKDNSKSSVYLQMNSLRTEDTALYYCARDRVTATLYAMDYWGQGTLVTVSS

SEQ ID NO: 3087 - protein, 120 aa, synthetic construct
EVQLVESGGGLVQPGGSLRLSCAVSGFSLTAYGVNWVRQAPGKGLEWLGMIWGDGNTDYNSALKSRLTISKHNSKSTVYLQMNSLRAEDTAVYYCARDRVTATLYAMDYWGQGTLVTVSS

SEQ ID NO: 3088 - protein, 120 aa, synthetic construct
EVQLVESGGGLVKPGGSLRLSCAVSGFSLTAYGVNWVRQAPGKGLEWLGMIWGDGNTDYNSALKSRLTISKDNAKSSVYLQMNSLRAEDTAVYYCARDRVTATLYAMDYWGQGTLVTVSS

SEQ ID NO: 3089 - protein, 120 aa, synthetic construct
EVQLVESGGGLIQPGGSLRLSCAVSGFSLTAYGVNWVRQPPGKGLEWLGMIWGDGNTDYNSALKSRLTISKDNSKSTVYLQMNSLRAEDTAVYYCARDRVTATLYAMDYWGQGTLVTVSS

SEQ ID NO: 3090 - skipped

SEQ ID NO: 3091 - protein, 119 aa, synthetic construct
QVQLQQSGPELVKPGASVKISCKASGYAFSSSWMNWVKQRPGQGLEWIGRIYPGDGDTKYNGKFKGKATLTADKSSSTAYMHLSSLTSVDSAVYFCARRGTGGWYFDVWGAGTTVTVSS

SEQ ID NO: 3092 - protein, 111 aa, synthetic construct
DIVLTQSPASLAVSLGQRATISCRASESVDSSGNSFMHWYQQKPGQPPQLLIYRASNLESGIPARFSGSGSRTDFTLTINPVEADDVATFYCQQSFDDPFTFGSGTKLEIK

SEQ ID NO: 3093 - protein, 111 aa, synthetic construct
DIVLTQSPDSLAVSLGERATINCRASESVDSSGNSFMHWYQQKPGQPPQLLIYRASNLESGVPDRFSGSGSRTDFTLTISSLQAEDVAVYYCQQSFDDPFTFGQGTKLEIK

SEQ ID NO: 3094 - protein, 111 aa, synthetic construct
EIVLTQSPATLSLSPGERATLSCRASESVDSSGNSFMHWYQQKPGQAPQLLIYRASNLESGIPARFSGSGSRTDFTLTISSLEPEDFAVYYCQQSFDDPFTFGQGTKLEIK

SEQ ID NO: 3095 - protein, 111 aa, synthetic construct
EIVLTQSPATLSLSPGERATLSCRASESVDSSGNSFMHWYQQKPGQAPQLLIYRASNLESGIPARFSGSGSRTDFTLTISRLEPEDFAVYYCQQSFDDPFTFGQGTKLEIK

SEQ ID NO: 3096 - protein, 111 aa, synthetic construct
EIVLTQSPATLSLSPGERATLSCRASESVDSSGNSFMHWYQQKPGQAPQLLIYRASNLESGIPARFSGSGSRTDFTLTISSLQPEDFAVYYCQQSFDDPFTFGQGTKLEIK

SEQ ID NO: 3097 - protein, 111 aa, synthetic construct
DIQLTQSPSSLSASVGDRVTITCRASESVDSSGNSFMHWYQQKPGQAPQLLIYRASNLESGVPSRFSGSGSRTDFTLTISSLQPEDVATYYCQQSFDDPFTFGQGTKLEIK

SEQ ID NO: 3098 - protein, 111 aa, synthetic construct
EIVLTQSPATLSLSPGERATLSCRASESVDSSGNSFMHWYQQKPGQAPQLLIYRASNLESGIPARFSGSGPRTDFTLTISSLEPEDFAVYYCQQSFDDPFTFGQGTKLEIK

SEQ ID NO: 3099 - protein, 111 aa, synthetic construct
EIVLTQSPATLSLSPGERATLSCRASESVDSSGNSFMHWYQQKPGQAPQLLIYRASNLESGIPDRFSGSGSRTDFTLTISRLEPEDFAVYYCQQSFDDPFTFGQGTKLEIK

SEQ ID NO: 3100 - protein, 111 aa, synthetic construct
DIQLTQSPSSLSASVGDRVTITCRASESVDSSGNSFMHWYQQKPGKVPQLLIYRASNLESGVPSRFSGSGSRTDFTLTISSLQPEDVATYYCQQSFDDPFTFGQGTKLEIK

SEQ ID NO: 3101 - protein, 111 aa, synthetic construct
DIQLTQSPSSLSASVGDRVTITCRASESVDSSGNSFMHWYQQKPGKTPQLLIYRASNLESGIPSRFSGSGSRTDFTLTIRSLQPEDFATYYCQQSFDDPFTFGQGTKLEIK

SEQ ID NO: 3102 - protein, 111 aa, synthetic construct
EIVLTQSPGTLSLSPGERATLSCRASESVDSSGNSFMHWYQQKPGQAPQLLIYRASNLESGIPDRFSGSGSRTDFTLTISRLEPEDFAVYYCQQSFDDPFTFGQGTKLEIK

SEQ ID NO: 3103 - protein, 111 aa, synthetic construct
EIVLTQSPATLSLSPGERATLSCRASESVDSSGNSFMHWYQQKPGLAPQLLIYRASNLESGIPDRFSGSGSRTDFTLTISRLEPEDFAVYYCQQSFDDPFTFGQGTKLEIK

SEQ ID NO: 3104 - protein, 111 aa, synthetic construct
DIQLTQSPSSLSASVGDRVTITCRASESVDSSGNSFMHWYQQKPGKAPQLLIYRASNLESGVPSRFSGSGSRTDFTLTISSLQPEDFATYYCQQSFDDPFTFGQGTKLEIK

SEQ ID NO: 3105 - protein, 111 aa, synthetic construct
DIQLTQSPSSVSASVGDRVTITCRASESVDSSGNSFMHWYQQKPGKAPQLLIYRASNLESGVPSRFSGSGSRTDFTLTISSLQPEDFATYYCQQSFDDPFTFGQGTKLEIK

SEQ ID NO: 3106 - protein, 111 aa, synthetic construct
AIQLTQSPSSLSASVGDRVTITCRASESVDSSGNSFMHWYQQKPGKAPQLLIYRASNLESGVPSRFSGSGSRTDFTLTISSLQPEDFATYYCQQSFDDPFTFGQGTKLEIK

SEQ ID NO: 3107 - protein, 111 aa, synthetic construct
DIQLTQSPSFLSASVGDRVTITCRASESVDSSGNSFMHWYQQKPGKAPQLLIYRASNLESGVPSRFSGSGSRTEFTLTISSLQPEDFATYYCQQSFDDPFTFGQGTKLEIK

SEQ ID NO: 3108 - protein, 111 aa, synthetic construct
DIQLTQSPSSLSASVGDRVTITCRASESVDSSGNSFMHWYQQKPGKAPQLLIYRASNLESGVPSRFSGSGSRTDFTFTISSLQPEDIATYYCQQSFDDPFTFGQGTKLEIK

SEQ ID NO: 3109 - protein, 111 aa, synthetic construct
EIVLTQSPATLSVSPGERATLSCRASESVDSSGNSFMHWYQQKPGQAPQLLIYRASNLESGIPARFSGSGSRTEFTLTISILQSEDFAVYYCQQSFDDPFTFGQGTKLEIK

SEQ ID NO: 3110 - protein, 111 aa, synthetic construct
EIVLTQSPATLSVSPGERATLSCRASESVDSSGNSFMHWYQQKPGQAPQLLIYRASNLESGIPARFSGSGSRTEFTLTISSLQSEDFAVYYCQQSFDDPFTFGQGTKLEIK

SEQ ID NO: 3111 - protein, 111 aa, synthetic construct
AIRLTQSPFSLSASVGDRVTITCRASESVDSSGNSFMHWYQQKPAKAPQLFIYRASNLESGVPSRFSGSGSRTDFTLTISSLQPEDFATYYCQQSFDDPFTFGQGTKLEIK

SEQ ID NO: 3112 - protein, 111 aa, synthetic construct
DIQLTQSPSSLSASVGDRVTITCRASESVDSSGNSFMHWYQQKPGKAPQSLIYRASNLESGVPSRFSGSGSRTDFTLTISSLQPEDFATYYCQQSFDDPFTFGQGTKLEIK

SEQ ID NO: 3113 - protein, 111 aa, synthetic construct
DIQLTQSPSSLSASVGDRVTITCRASESVDSSGNSFMHWYQQKPGKAPQRLIYRASNLESGVPSRFSGSGSRTEFTLTISNLQPEDFATYYCQQSFDDPFTFGQGTKLEIK

SEQ ID NO: 3114 - protein, 111 aa, synthetic construct
DIQLTQSPSTLSASVGDRVTITCRASESVDSSGNSFMHWYQQKPGKAPQLLIYRASNLESGVPSRFSGSGSRTEFTLTISSLQPDDFATYYCQQSFDDPFTFGQGTKLEIK

SEQ ID NO: 3115 - protein, 111 aa, synthetic construct
EIVLTQSPDFQSVTPKEKVTITCRASESVDSSGNSFMHWYQQKPDQSPQLLIYRASNLESGVPSRFSGSGSRTDFTLTINSLEAEDAATYYCQQSFDDPFTFGQGTKLEIK

SEQ ID NO: 3116 - protein, 111 aa, synthetic construct
DIQLTQSPSSLSASVGDRVTITCRASESVDSSGNSFMHWYQQKPGKAPQSLIYRASNLESGVPSKFSGSGSRTDFTLTISSLQPEDFATYYCQQSFDDPFTFGQGTKLEIK

SEQ ID NO: 3117 - protein, 111 aa, synthetic construct
DIQLTQSPSSLSASVGDRVTITCRASESVDSSGNSFMHWYQQKPGKAPQRLIYRASNLESGVPSRFSGSGSRTEFTLTISSLQPEDFATYYCQQSFDDPFTFGQGTKLEIK

SEQ ID NO: 3118 - protein, 111 aa, synthetic construct
DIVLTQTPLSLSVTPGQPASISCRASESVDSSGNSFMHWYLQKPGQPPQLLIYRASNLESGVPDRFSGSGSRTDFTLKISRVEAEDVGVYYCQQSFDDPFTFGQGTKLEIK

SEQ ID NO: 3119 - protein, 111 aa, synthetic construct
DIQLTQSPSSLSASVGDRVTITCRASESVDSSGNSFMHWYQQKPEKAPQSLIYRASNLESGVPSRFSGSGSRTDFTLTISSLQPEDFATYYCQQSFDDPFTFGQGTKLEIK

SEQ ID NO: 3120 - protein, 111 aa, synthetic construct
EIVLTQSPPTLSLSPGERVTLSCRASESVDSSGNSFMHWYQQKPGQAPQLLIYRASNLESGIPARFSGSGSRTDFTLTISSLQPEDFAVYYCQQSFDDPFTFGQGTKLEIK

SEQ ID NO: 3121 - protein, 111 aa, synthetic construct
DIQLTQSPSAMSASVGDRVTITCRASESVDSSGNSFMHWYQQKPGKVPQRLIYRASNLESGVPSRFSGSGSRTEFTLTISSLQPEDFATYYCQQSFDDPFTFGQGTKLEIK

SEQ ID NO: 3122 - protein, 111 aa, synthetic construct
DIVLTQSPLSLPVTPGEPASISCRASESVDSSGNSFMHWYLQKPGQSPQLLIYRASNLESGVPDRFSGSGSRTDFTLKISRVEAEDVGVYYCQQSFDDPFTFGQGTKLEIK

SEQ ID NO: 3123 - protein, 111 aa, synthetic construct
DIVLTQTPLSLPVTPGEPASISCRASESVDSSGNSFMHWYLQKPGQSPQLLIYRASNLESGVPDRFSGSGSRTDFTLKISRVEAEDVGVYYCQQSFDDPFTFGQGTKLEIK

SEQ ID NO: 3124 - protein, 111 aa, synthetic construct
DIVLTQTPLSLSVTPGQPASISCRASESVDSSGNSFMHWYLQKPGQSPQLLIYRASNLESGVPDRFSGSGSRTDFTLKISRVEAEDVGVYYCQQSFDDPFTFGQGTKLEIK

SEQ ID NO: 3125 - protein, 111 aa, synthetic construct
EIVLTQSPPTLSLSPGERVTLSCRASESVDSSGNSFMHWYQQKPGQAPQLLIYRASNLESSIPARFSGSGSRTDFTLTISSLQPEDFAVYYCQQSFDDPFTFGQGTKLEIK

SEQ ID NO: 3126 - protein, 111 aa, synthetic construct
DIVLTQSPLSLPVTLGQPASISCRASESVDSSGNSFMHWYQQRPGQSPQRLIYRASNLESGVPDRFSGSGSRTDFTLKISRVEAEDVGVYYCQQSFDDPFTFGQGTKLEIK

SEQ ID NO: 3127 - protein, 111 aa, synthetic construct
DIVLTQTPLSSPVTLGQPASISCRASESVDSSGNSFMHWYQQRPGQPPQLLIYRASNLESGVPDRFSGSGARTDFTLKISRVEAEDVGVYYCQQSFDDPFTFGQGTKLEIK

SEQ ID NO: 3128 - protein, 111 aa, synthetic construct
DIVLTQSPAFLSVTPGEKVTITCRASESVDSSGNSFMHWYQQKPDQAPQLLIYRASNLESGVPSRFSGSGSRTDFTFTISSLEAEDAATYYCQQSFDDPFTFGQGTKLEIK

SEQ ID NO: 3129 - protein, 111 aa, synthetic construct
DIQLIQSPSFLSASVGDRVSIICRASESVDSSGNSFMHWYLQKPGKSPQLFIYRASNLESGVSSRFSGRGSRTDFTLTIISLKPEDFAAYYCQQSFDDPFTFGQGTKLEIK

SEQ ID NO: 3130 - protein, 111 aa, synthetic construct
EIVLTQTPLSLSITPGEQASISCRASESVDSSGNSFMHWYLQKARPVPQLLIYRASNLESGVPDRFSGSGSRTDFTLKISRVEAEDFGVYYCQQSFDDPFTFGQGTKLEIK

SEQ ID NO: 3131 - protein, 111 aa, synthetic construct
EIVLTQTPLSLSITPGEQASMSCRASESVDSSGNSFMHWYLQKARPVPQLLIYRASNLESGVPDRFSGSGSRTDFTLKISRVEAEDFGVYYCQQSFDDPFTFGQGTKLEIK

SEQ ID NO: 3132 - protein, 111 aa, synthetic construct
EITLTQSPAFMSATPGDKVNISCRASESVDSSGNSFMHWYQQKPGEAPQFIIYRASNLESGIPPRFSGSGYRTDFTLTINNIESEDAAYYYCQQSFDDPFTFGQGTKLEIK

SEQ ID NO: 3133 - protein, 119 aa, synthetic construct
QVQLVQSGAEVKKPGASVKVSCKASGYAFSSSWMNWVRQAPGQGLEWIGRIYPGDGDTKYNGKFKGRATLTADKSTSTAYMELSSLRSEDTAVYYCARRGTGGWYFDVWGQGTTVTVSS

SEQ ID NO: 3134 - protein, 119 aa, synthetic construct
QVQLVQSGAEVKKPGSSVKVSCKASGYAFSSSWMNWVRQAPGQGLEWIGRIYPGDGDTKYNGKFKGRATLTADKSTSTAYMELSSLRSEDTAVYYCARRGTGGWYFDVWGQGTTVTVSS

SEQ ID NO: 3135 - protein, 119 aa, synthetic construct
QVQLVQSGAEVKKPGASVKVSCKASGYAFSSSWMNWVRQAPGKGLEWIGRIYPGDGDTKYNGKFKGRATLTADKSTSTAYMELSSLRSEDTAVYYCARRGTGGWYFDVWGQGTTVTVSS

SEQ ID NO: 3136 - protein, 119 aa, synthetic construct
QVQLVQSGAEVKKPGASVKVSCKASGYAFSSSWMNWVRQAPGQELEWIGRIYPGDGDTKYNGKFKGRATLTADKSISTAYMELSSLRSEDTATYYCARRGTGGWYFDVWGQGTTVTVSS

SEQ ID NO: 3137 - protein, 119 aa, synthetic construct
EVQLVQSGAEVKKPGATVKISCKASGYAFSSSWMNWVQQAPGKGLEWIGRIYPGDGDTKYNGKFKGRATLTADKSTSTAYMELSSLRSEDTAVYYCARRGTGGWYFDVWGQGTTVTVSS

SEQ ID NO: 3138 - protein, 119 aa, synthetic construct
QVQLVQSGAEVKKTGSSVKVSCKASGYAFSSSWMNWVRQAPGQALEWIGRIYPGDGDTKYNGKFKGRATLTADKSMSTAYMELSSLRSEDTAMYYCARRGTGGWYFDVWGQGTTVTVSS

SEQ ID NO: 3139 - protein, 119 aa, synthetic construct
QVQLVQSGAEVKKPGASVKVSCKASGYAFSSSWMNWVRQAPGQRLEWIGRIYPGDGDTKYNGKFKGRATLTADKSASTAYMELSSLRSEDMAVYYCARRGTGGWYFDVWGQGTTVTVSS

SEQ ID NO: 3140 - protein, 119 aa, synthetic construct
QVQLVQSGAEVKKPGASVKVSCKASGYAFSSSWMNWVRQAPGQGLEWIGRIYPGDGDTKYNGKFKGRATLTADKSTSTAYMELRSLRSDDMAVYYCARRGTGGWYFDVWGQGTTVTVSS

SEQ ID NO: 3141 - protein, 119 aa, synthetic construct
QVQLVQSGAEVKKPGASVKVSCKASGYAFSSSWMNWVRQAPGQRLEWIGRIYPGDGDTKYNGKFKGRATLTADKSASTAYMELSSLRSEDTAVYYCARRGTGGWYFDVWGQGTTVTVSS

SEQ ID NO: 3142 - protein, 119 aa, synthetic construct
QVQLVQSGAEVKKPGASVKVSCKASGYAFSSSWMNWVRQAPGQGLEWIGRIYPGDGDTKYNGKFKGRATLTADKSTSTAYMELRSLRSDDTAVYYCARRGTGGWYFDVWGQGTTVTVSS

SEQ ID NO: 3143 - protein, 119 aa, synthetic construct
QVQLVQSGAEVKKPGASVKVSCKASGYAFSSSWMNWVRQAPGQGLEWIGRIYPGDGDTKYNGKFKGRATLTADKSISTAYMELSRLRSDDTAVYYCARRGTGGWYFDVWGQGTTVTVSS

SEQ ID NO: 3144 - protein, 119 aa, synthetic construct
QVQLVQSGAEVKKPGASVKVSCKASGYAFSSSWMNWVRQAPGQGLEWIGRIYPGDGDTKYNGKFKGRATLTADKSISTAYMELSRLRSDDTVVYYCARRGTGGWYFDVWGQGTTVTVSS

SEQ ID NO: 3145 - protein, 119 aa, synthetic construct
QVQLVQSGAEVKKPGASVKVSCKASGYAFSSSWMNWVRQAPGQGLEWIGRIYPGDGDTKYNGKFKGWATLTADKSISTAYMELSRLRSDDTAVYYCARRGTGGWYFDVWGQGTTVTVSS

SEQ ID NO: 3146 - protein, 119 aa, synthetic construct
QVQLVQSGAEVKKPGASVKVSCKASGYAFSSSWMNWVRQATGQGLEWIGRIYPGDGDTKYNGKFKGRATLTANKSISTAYMELSSLRSEDTAVYYCARRGTGGWYFDVWGQGTTVTVSS

SEQ ID NO: 3147 - protein, 119 aa, synthetic construct
QVQLVQSGSELKKPGASVKVSCKASGYAFSSSWMNWVRQAPGQGLEWIGRIYPGDGDTKYNGKFKGRAVLSADKSVSTAYLQISSLKAEDTAVYYCARRGTGGWYFDVWGQGTTVTVSS

SEQ ID NO: 3148 - protein, 119 aa, synthetic construct
QVQLVQSGPEVKKPGTSVKVSCKASGYAFSSSWMNWVRQARGQRLEWIGRIYPGDGDTKYNGKFKGRATLTADKSTSTAYMELSSLRSEDTAVYYCARRGTGGWYFDVWGQGTTVTVSS

SEQ ID NO: 3149 - protein, 119 aa, synthetic construct
EVQLVQSGAEVKKPGESLKISCKASGYAFSSSWMNWVRQMPGKGLEWIGRIYPGDGDTKYNGKFKGQATLSADKSISTAYLQWSSLKASDTAMYYCARRGTGGWYFDVWGQGTTVTVSS

SEQ ID NO: 3150 - protein, 119 aa, synthetic construct
QVQLVQSGSELKKPGASVKVSCKASGYAFSSSWMNWVRQAPGQGLEWIGRIYPGDGDTKYNGKFKGRAVLSADKSVSMAYLQISSLKAEDTAVYYCARRGTGGWYFDVWGQGTTVTVSS

SEQ ID NO: 3151 - protein, 119 aa, synthetic construct
QVQLVQSGHEVKQPGASVKVSCKASGYAFSSSWMNWVPQAPGQGLEWIGRIYPGDGDTKYNGKFKGRAVLSADKSASTAYLQISSLKAEDMAMYYCARRGTGGWYFDVWGQGTTVTVSS

SEQ ID NO: 3152 - protein, 119 aa, synthetic construct
EVQLVQSGAEVKKPGESLKISCKASGYAFSSSWMNWVRQMPGKGLEWIGRIYPGDGDTKYNGKFKGQATLSADKPISTAYLQWSSLKASDTAMYYCARRGTGGWYFDVWGQGTTVTVSS

SEQ ID NO: 3153 - protein, 119 aa, synthetic construct
EVQLVQSGAEVKKPGESLRISCKASGYAFSSSWMNWVRQMPGKGLEWIGRIYPGDGDTKYNGKFKGQATLSADKSISTAYLQWSSLKASDTAMYYCARRGTGGWYFDVWGQGTTVTVSS

SEQ ID NO: 3154 - protein, 119 aa, synthetic construct
EVQLVQSGAEVKKPGESLRISCKASGYAFSSSWMNWVRQMPGKGLEWIGRIYPGDGDTKYNGKFKGHATLSADKSISTAYLQWSSLKASDTAMYYCARRGTGGWYFDVWGQGTTVTVSS

SEQ ID NO: 3155 - protein, 119 aa, synthetic construct
QVQLVQSGAEVKKTGSSVKVSCKASGYAFSSSWMNWVRQAPRQALEWIGRIYPGDGDTKYNGKFKGRATLTADKSMSTAYMELSSLRSEDTAMYYCARRGTGGWYFDVWGQGTTVTVSS

SEQ ID NO: 3156 - protein, 119 aa, synthetic construct
EVQLVESGGGLVQPGRSLRLSCTASGYAFSSSWMNWVRQAPGKGLEWIGRIYPGDGDTKYNGKFKGRATLSADKSKSIAYLQMNSLKTEDTAVYYCARRGTGGWYFDVWGQGTTVTVSS

SEQ ID NO: 3157 - protein, 119 aa, synthetic construct
EVQLVESGGGLVQPGPSLRLSCTASGYAFSSSWMNWVRQAPGKGLEWIGRIYPGDGDTKYNGKFKGRATLSADKSKSIAYLQMNSLKTEDTAVYYCARRGTGGWYFDVWGQGTTVTVSS

SEQ ID NO: 3158 - protein, 119 aa, synthetic construct
QVQLQESGPGLVKPSQTLSLTCTASGYAFSSSWMNWVRQPPGKGLEWIGRIYPGDGDTKYNGKFKGRATLSADKSKSQASLKLSSVTAADTAVYYCARRGTGGWYFDVWGQGTTVTVSS

SEQ ID NO: 3159 - protein, 119 aa, synthetic construct
QVQLQESGPGLVKPSGTLSLTCAASGYAFSSSWMNWVRQPPGKGLEWIGRIYPGDGDTKYNGKFKGRATLSADKSKSQASLKLSSVTAADTAVYYCARRGTGGWYFDVWGQGTTVTVSS

SEQ ID NO: 3160 - protein, 119 aa, synthetic construct
EVQLVESGGGLVKPGRSLRLSCTASGYAFSSSWMNWVRQAPGKGLEWIGRIYPGDGDTKYNGKFKGRATLSADKSKSIAYLQMNSLKTEDTAVYYCARRGTGGWYFDVWGQGTTVTVSS

SEQ ID NO: 3161 - protein, 119 aa, synthetic construct
EVQLVESGGGLVQPGGSLKLSCAASGYAFSSSWMNWVRQASGKGLEWIGRIYPGDGDTKYNGKFKGRATLSADKSKSTAYLQMNSLKTEDTAVYYCARRGTGGWYFDVWGQGTTVTVSS

SEQ ID NO: 3162 - protein, 119 aa, synthetic construct
QVQLQESGPGLVKPSQTLSLTCAASGYAFSSSWMNWVRQPPGKGLEWIGRIYPGDGDTKYNGKFKGRATLSADKSKSQASLKLSSVTAADTAVYYCARRGTGGWYFDVWGQGTTVTVSS

SEQ ID NO: 3163 - protein, 119 aa, synthetic construct
EVQLVESGGGLVKPGGSLRLSCAASGYAFSSSWMNWVRQAPGKGLEWIGRIYPGDGDTKYNGKFKGRATLSADKSKSTAYLQMNSLKTEDTAVYYCARRGTGGWYFDVWGQGTTVTVSS

SEQ ID NO: 3164 - protein, 119 aa, synthetic construct
EVQLVESGGALVKPGGSLRLSCAASGYAFSSSWMNWVRQAPGKGLEWIGRIYPGDGDTKYNGKFKGRATLSADKSKSTAYLQMNSLKTEDTAVYYCARRGTGGWYFDVWGQGTTVTVSS

SEQ ID NO: 3165 - protein, 119 aa, synthetic construct
QVQLQESGPGLVKPSQTLSLTCAAYGYAFSSSWMNWVRQPPGKGLEWIGRIYPGDGDTKYNGKFKGRATLSADKSKSQASLKLSSVTAADTAVYYCARRGTGGWYFDVWGQGTTVTVSS

SEQ ID NO: 3166 - protein, 119 aa, synthetic construct
QVQLQESGSGLVKPSQTLSLTCAASGYAFSSSWMNWVRQPPGKGLEWIGRIYPGDGDTKYNGKFKGRATLSADKSKSQASLKLSSVTAADTAVYYCARRGTGGWYFDVWGQGTTVTVSS

SEQ ID NO: 3167 - protein, 119 aa, synthetic construct
EVQLVESGGGLVQPGGSLRLSCAASGYAFSSSWMNWVRQAPGKGLEWIGRIYPGDGDTKYNGKFKGRATLSADKSKSSAYLQMNSLKTEDTAVYYCARRGTGGWYFDVWGQGTTVTVSS

SEQ ID NO: 3168 - protein, 119 aa, synthetic construct
QVQLQESGPGLVKPSDTLSLTCTASGYAFSSSWMNWVRQPPGKGLEWIGRIYPGDGDTKYNGKFKGRATLSADKSKSQASLKLSSVTAADTAVYYCARRGTGGWYFDVWGQGTTVTVSS

SEQ ID NO: 3169 - protein, 119 aa, synthetic construct
QVQLQESGPGLVKPSQTLSLTCTASGYAFSSSWMNWVRQHPGKGLEWIGRIYPGDGDTKYNGKFKGRATLSADKSKSQASLKLSSVTAADTAVYYCARRGTGGWYFDVWGQGTTVTVSS

SEQ ID NO: 3170 - protein, 119 aa, synthetic construct
QVQLQESGPGLVKPSQTLSLTCTASGYAFSSSWMNWVRQHPGKGLEWIGRIYPGDGDTKYNGKFKGLATLSADKSKSQASLKLSSVTAADTAVYYCARRGTGGWYFDVWGQGTTVTVSS

SEQ ID NO: 3171 - protein, 119 aa, synthetic construct
QVQLVESGGGVVQPGRSLRLSCAASGYAFSSSWMNWVRQAPGKGLEWIGRIYPGDGDTKYNGKFKGRATLSADKSKSTAYLQMSSLRAEDTAVYYCARRGTGGWYFDVWGQGTTVTVSS

SEQ ID NO: 3172 - protein, 119 aa, synthetic construct
QVQLVESGGGLVKPGGSLRLSCAASGYAFSSSWMNWVRQAPGKGLEWIGRIYPGDGDTKYNGKFKGRATLSADKAKSSAYLQMNSLRAEDTAVYYCARRGTGGWYFDVWGQGTTVTVSS

SEQ ID NO: 3173 - protein, 119 aa, synthetic construct
QVQLVESGGGLVQPGGSLRLSCSASGYAFSSSWMNWVRQAPGKGLEWIGRIYPGDGDTKYNGKFKGRATLSADKSKSTAYLQMNSLRAEDTAVYYCARRGTGGWYFDVWGQGTTVTVSS

SEQ ID NO: 3174 - protein, 119 aa, synthetic construct
QVQLLESGGGLVKPGGSLRLSCAASGYAFSSSWMNWVRQAPGKGLEWIGRIYPGDGDTKYNGKFKGRATLSADKAKSSAYLQMNSLRAEDTAVYYCARRGTGGWYFDVWGQGTTVTVSS

SEQ ID NO: 3175 - protein, 119 aa, synthetic construct
EVQLVESGGGLVQPGGSLRLSCSASGYAFSSSWMNWVRQAPGKGLEWIGRIYPGDGDTKYNGKFKGRATLSADKSKSTAYLQMSSLRAEDTAVYYCARRGTGGWYFDVWGQGTTVTVSS

SEQ ID NO: 3176 - protein, 119 aa, synthetic construct
QVQLQESGPGLVKPSDTLSLTCAASGYAFSSSWMNWVRQPPGKGLEWIGRIYPGDGDTKYNGKFKGRATLSADKSKSQASLKLSSVTAVDTAVYYCARRGTGGWYFDVWGQGTTVTVSS

SEQ ID NO: 3177 - protein, 119 aa, synthetic construct
QVQLQESGPGLVKPSQTLSLTCAASGYAFSSSWMNWVRQPPGKGLEWIGRIYPGDGDTKYNGKFKGRATLSADKSKSQASLKLSSVTAVDTAVYYCARRGTGGWYFDVWGQGTTVTVSS

SEQ ID NO: 3178 - protein, 119 aa, synthetic construct
EVQLVESGGGLVQPGGSLRLSCSASGYAFSSSWMNWVRQAPGKGLEWIGRIYPGDGDTKYNGKFKGRATLSADKSKSTAYVQMSSLRAEDTAVYYCARRGTGGWYFDVWGQGTTVTVSS

SEQ ID NO: 3179 - protein, 119 aa, synthetic construct
QVQLVDSGGGVVQPGRSLRLSCAASGYAFSSSWMNWVRQAPGKGLEWIGRIYPGDGDTKYNGKFKGRATLSADKSKSTAYLQMNSLRAEDTAVYYCARRGTGGWYFDVWGQGTTVTVSS

SEQ ID NO: 3180 - protein, 119 aa, synthetic construct
QVQLVESGGGVVQPGRSLRLSCAASGYAFSSSWMNWVRQAPGKGLEWIGRIYPGDGDTKYNGKFKGRATLSADKSKSTAYLQMNSLRAEGTAVYYCARRGTGGWYFDVWGQGTTVTVSS

SEQ ID NO: 3181 - protein, 119 aa, synthetic construct
QVQLVESGGGVVQPGRSLRLSCAASGYAFSSSWMNWVRQAPGKGLEWIGRIYPGDGDTKYNGKFKGRATLSADKSKSTAYLQMNSLRAEDTAVYYCARRGTGGWYFDVWGQGTTVTVSS

SEQ ID NO: 3182 - protein, 119 aa, synthetic construct
EVQLVESGGGLVQPGGSLRLSCAASGYAFSSSWMNWVRQAPGKGLEWIGRIYPGDGDTKYNGKFKGRATLSADKSKSTAYLQMNSLRAEDTAVYYCARRGTGGWYFDVWGQGTTVTVSS

SEQ ID NO: 3183 - protein, 117 aa, synthetic construct
EVQLVESGGDLVKPGGSLKLSCAVSGFTFRSYGMSWVRQTPDKRLEWVALISSGGSYTYYTDSVKGRFTISRDNAKNTLYLQMSSLKSEDTAIYYCSRHGGNFFDYWGQGTTLTVSS

SEQ ID NO: 3184 - protein, 107 aa, synthetic construct
QIVLTQSPSIMSASPGEKVTMTCSVSSSVSYMHWYQQKSGTSPKRWIYDTSKLASGVPARFSGSGSGTSYSLTISSMEAEDAATYYCQQWSSNPQYTFGGGTKLEIK

SEQ ID NO: 3185 - protein, 107 aa, synthetic construct
DIVLTQSPAFLSVTPGEKVTITCSVSSSVSYMHWYQQKPDQAPKLLIYDTSKLASGVPSRFSGSGSGTDYTFTISSLEAEDAATYYCQQWSSNPQYTFGQGTKLEIK

SEQ ID NO: 3186 - protein, 107 aa, synthetic construct
AIQLTQSPSSLSASVGDRVTITCSVSSSVSYMHWYQQKPGKAPKLLIYDTSKLASGVPSRFSGSGSGTDYTLTISSLQPEDFATYYCQQWSSNPQYTFGQGTKLEIK

SEQ ID NO: 3187 - protein, 107 aa, synthetic construct
DIQLTQSPSFLSASVGDRVTITCSVSSSVSYMHWYQQKPGKAPKLLIYDTSKLASGVPSRFSGSGSGTEYTLTISSLQPEDFATYYCQQWSSNPQYTFGQGTKLEIK

SEQ ID NO: 3188 - protein, 107 aa, synthetic construct
DIQLTQSPSSLSASVGDRVTITCSVSSSVSYMHWYQQKPGKAPKLLIYDTSKLASGVPSRFSGSGSGTDYTLTISSLQPEDFATYYCQQWSSNPQYTFGQGTKLEIK

SEQ ID NO: 3189 - protein, 107 aa, synthetic construct
DIQLTQSPSSVSASVGDRVTITCSVSSSVSYMHWYQQKPGKAPKLLIYDTSKLASGVPSRFSGSGSGTDYTLTISSLQPEDFATYYCQQWSSNPQYTFGQGTKLEIK

SEQ ID NO: 3190 - protein, 107 aa, synthetic construct
DIQLTQSPSSLSASVGDRVTITCSVSSSVSYMHWYQQKPGKVPKLLIYDTSKLASGVPSRFSGSGSGTDYTLTISSLQPEDVATYYCQQWSSNPQYTFGQGTKLEIK

SEQ ID NO: 3191 - protein, 107 aa, synthetic construct
DIQLTQSPSSLSASVGDRVTITCSVSSSVSYMHWYQQKPGQAPKLLIYDTSKLASGVPSRFSGSGSGTDYTLTISSLQPEDVATYYCQQWSSNPQYTFGQGTKLEIK

SEQ ID NO: 3192 - protein, 107 aa, synthetic construct
EIVLTQSPDFQSVTPKEKVTITCSVSSSVSYMHWYQQKPDQSPKLLIYDTSKLASGVPSRFSGSGSGTDYTLTINSLEAEDAATYYCQQWSSNPQYTFGQGTKLEIK

SEQ ID NO: 3193 - protein, 107 aa, synthetic construct
AIRLTQSPFSLSASVGDRVTITCSVSSSVSYMHWYQQKPAKAPKLFIYDTSKLASGVPSRFSGSGSGTDYTLTISSLQPEDFATYYCQQWSSNPQYTFGQGTKLEIK

SEQ ID NO: 3194 - protein, 107 aa, synthetic construct
DIQLTQSPSSLSASVGDRVTITCSVSSSVSYMHWYQQKPGKAPKLLIYDTSKLASGVPSRFSGSGSGTDYTFTISSLQPEDIATYYCQQWSSNPQYTFGQGTKLEIK

SEQ ID NO: 3195 - protein, 107 aa, synthetic construct
EIVLTQSPATLSLSPGERATLSCSVSSSVSYMHWYQQKPGQAPKLLIYDTSKLASGIPARFSGSGSGTDYTLTISSLEPEDFAVYYCQQWSSNPQYTFGQGTKLEIK

SEQ ID NO: 3196 - protein, 107 aa, synthetic construct
DIQLTQSPSTLSASVGDRVTITCSVSSSVSYMHWYQQKPGKAPKLLIYDTSKLASGVPSRFSGSGSGTEYTLTISSLQPDDFATYYCQQWSSNPQYTFGQGTKLEIK

SEQ ID NO: 3197 - protein, 107 aa, synthetic construct
DIQLTQSPSSLSASVGDRVTITCSVSSSVSYMHWYQQKPGKTPKLLIYDTSKLASGIPSRFSGSGSGTDYTLTIRSLQPEDFATYYCQQWSSNPQYTFGQGTKLEIK

SEQ ID NO: 3198 - protein, 107 aa, synthetic construct
EIVLTQSPPTLSLSPGERVTLSCSVSSSVSYMHWYQQKPGQAPKLLIYDTSKLASGIPARFSGSGSGTDYTLTISSLQPEDFAVYYCQQWSSNPQYTFGQGTKLEIK

SEQ ID NO: 3199 - protein, 107 aa, synthetic construct
DIQLTQSPSSLSASVGDRVTITCSVSSSVSYMHWYQQKPGKAPKRLIYDTSKLASGVPSRFSGSGSGTEYTLTISSLQPEDFATYYCQQWSSNPQYTFGQGTKLEIK

SEQ ID NO: 3200 - protein, 107 aa, synthetic construct
EIVLTQSPATLSLSPGERATLSCSVSSSVSYMHWYQQKPGQAPKLLIYDTSKLASGIPARFSGSGPGTDYTLTISSLEPEDFAVYYCQQWSSNPQYTFGQGTKLEIK

SEQ ID NO: 3201 - protein, 107 aa, synthetic construct
EIVLTQSPATLSLSPGERATLSCSVSSSVSYMHWYQQKPGQAPKLLIYDTSKLASGIPARFSGSGSGTDYTLTISRLEPEDFAVYYCQQWSSNPQYTFGQGTKLEIK

SEQ ID NO: 3202 - protein, 107 aa, synthetic construct
EIVLTQSPATLSLSPGERATLSCSVSSSVSYMHWYQQKPGQAPKLLIYDTSKLASGIPARFSGSGSGTDYTLTISSLQPEDFAVYYCQQWSSNPQYTFGQGTKLEIK

SEQ ID NO: 3203 - protein, 107 aa, synthetic construct
EIVLTQSPATLSVSPGERATLSCSVSSSVSYMHWYQQKPGQAPKLLIYDTSKLASGIPARFSGSGSGTEYTLTISSLQSEDFAVYYCQQWSSNPQYTFGQGTKLEIK

SEQ ID NO: 3204 - protein, 107 aa, synthetic construct
EIVLTQSPATLSVSPGERATLSCSVSSSVSYMHWYQQKPGQAPKLLIYDTSKLASGIPARFSGSGSGTEYTLTISILQSEDFAVYYCQQWSSNPQYTFGQGTKLEIK

SEQ ID NO: 3205 - protein, 107 aa, synthetic construct
EIVLTQSPPTLSLSPGERVTLSCSVSSSVSYMHWYQQKPGQAPKLLIYDTSKLASSIPARFSGSGSGTDYTLTISSLQPEDFAVYYCQQWSSNPQYTFGQGTKLEIK

SEQ ID NO: 3206 - protein, 107 aa, synthetic construct
DIQLTQSPSSLSASVGDRVTITCSVSSSVSYMHWYQQKPGKAPKSLIYDTSKLASGVPSRFSGSGSGTDYTLTISSLQPEDFATYYCQQWSSNPQYTFGQGTKLEIK

SEQ ID NO: 3207 - protein, 107 aa, synthetic construct
DIQLTQSPSSLSASVGDRVTITCSVSSSVSYMHWYQQKPGKAPKRLIYDTSKLASGVPSRFSGSGSGTEYTLTISNLQPEDFATYYCQQWSSNPQYTFGQGTKLEIK

SEQ ID NO: 3208 - protein, 107 aa, synthetic construct
DIQLTQSPSAMSASVGDRVTITCSVSSSVSYMHWYQQKPGKVPKRLIYDTSKLASGVPSRFSGSGSGTEYTLTISSLQPEDFATYYCQQWSSNPQYTFGQGTKLEIK

SEQ ID NO: 3209 - protein, 107 aa, synthetic construct
EIVLTQSPATLSLSPGERATLSCSVSSSVSYMHWYQQKPGQAPKLLIYDTSKLASGIPDRFSGSGSGTDYTLTISRLEPEDFAVYYCQQWSSNPQYTFGQGTKLEIK

SEQ ID NO: 3210 - protein, 107 aa, synthetic construct
EIVLTQSPATLSLSPGERATLSCSVSSSVSYMHWYQQKPGLAPKLLIYDTSKLASGIPDRFSGSGSGTDYTLTISRLEPEDFAVYYCQQWSSNPQYTFGQGTKLEIK

SEQ ID NO: 3211 - protein, 107 aa, synthetic construct
EIVLTQSPGTLSLSPGERATLSCSVSSSVSYMHWYQQKPGQAPKLLIYDTSKLASGIPDRFSGSGSGTDYTLTISRLEPEDFAVYYCQQWSSNPQYTFGQGTKLEIK

SEQ ID NO: 3212 - protein, 107 aa, synthetic construct
DIQLTQSPSSLSASVGDRVTITCSVSSSVSYMHWYQQKPGKAPKSLIYDTSKLASGVPSKFSGSGSGTDYTLTISSLQPEDFATYYCQQWSSNPQYTFGQGTKLEIK

SEQ ID NO: 3213 - protein, 107 aa, synthetic construct
DIQLTQSPSSLSASVGDRVTITCSVSSSVSYMHWYQQKPEKAPKSLIYDTSKLASGVPSRFSGSGSGTDYTLTISSLQPEDFATYYCQQWSSNPQYTFGQGTKLEIK

SEQ ID NO: 3214 - protein, 107 aa, synthetic construct
DIVLTQSPDSLAVSLGERATINCSVSSSVSYMHWYQQKPGQPPKLLIYDTSKLASGVPDRFSGSGSGTDYTLTISSLQAEDVAVYYCQQWSSNPQYTFGQGTKLEIK

SEQ ID NO: 3215 - protein, 107 aa, synthetic construct
EIVLTQTPLSLSITPGEQASMSCSVSSSVSYMHWYLQKARPVPKLLIYDTSKLASGVPDRFSGSGSGTDYTLKISRVEAEDFGVYYCQQWSSNPQYTFGQGTKLEIK

SEQ ID NO: 3216 - protein, 107 aa, synthetic construct
EIVLTQTPLSLSITPGEQASISCSVSSSVSYMHWYLQKARPVPKLLIYDTSKLASGVPDRFSGSGSGTDYTLKISRVEAEDFGVYYCQQWSSNPQYTFGQGTKLEIK

SEQ ID NO: 3217 - protein, 107 aa, synthetic construct
DIVLTQSPLSLPVTPGEPASISCSVSSSVSYMHWYLQKPGQSPKLLIYDTSKLASGVPDRFSGSGSGTDYTLKISRVEAEDVGVYYCQQWSSNPQYTFGQGTKLEIK

SEQ ID NO: 3218 - protein, 107 aa, synthetic construct
DIVLTQSPLSLPVTLGQPASISCSVSSSVSYMHWYQQRPGQSPKRLIYDTSKLASGVPDRFSGSGSGTDYTLKISRVEAEDVGVYYCQQWSSNPQYTFGQGTKLEIK

SEQ ID NO: 3219 - protein, 107 aa, synthetic construct
DIVLTQTPLSLPVTPGEPASISCSVSSSVSYMHWYLQKPGQSPKLLIYDTSKLASGVPDRFSGSGSGTDYTLKISRVEAEDVGVYYCQQWSSNPQYTFGQGTKLEIK

SEQ ID NO: 3220 - protein, 107 aa, synthetic construct
DIVLTQTPLSLSVTPGQPASISCSVSSSVSYMHWYLQKPGQSPKLLIYDTSKLASGVPDRFSGSGSGTDYTLKISRVEAEDVGVYYCQQWSSNPQYTFGQGTKLEIK

SEQ ID NO: 3221 - protein, 107 aa, synthetic construct
DIVLTQTPLSLSVTPGQPASISCSVSSSVSYMHWYLQKPGQPPKLLIYDTSKLASGVPDRFSGSGSGTDYTLKISRVEAEDVGVYYCQQWSSNPQYTFGQGTKLEIK

SEQ ID NO: 3222 - protein, 107 aa, synthetic construct
DIQLIQSPSFLSASVGDRVSIICSVSSSVSYMHWYLQKPGKSPKLFIYDTSKLASGVSSRFSGRGSGTDYTLTIISLKPEDFAAYYCQQWSSNPQYTFGQGTKLEIK

SEQ ID NO: 3223 - protein, 107 aa, synthetic construct
DIVLTQTPLSSPVTLGQPASISCSVSSSVSYMHWYQQRPGQPPKLLIYDTSKLASGVPDRFSGSGAGTDYTLKISRVEAEDVGVYYCQQWSSNPQYTFGQGTKLEIK

SEQ ID NO: 3224 - protein, 107 aa, synthetic construct
EITLTQSPAFMSATPGDKVNISCSVSSSVSYMHWYQQKPGEAPKFIIYDTSKLASGIPPRFSGSGYGTDYTLTINNIESEDAAYYYCQQWSSNPQYTFGQGTKLEIK

SEQ ID NO: 3225 - protein, 117 aa, synthetic construct
EVQLVESGGGLVKPGGSLRLSCAVSGFTFRSYGMSWVRQAPGKGLEWVALISSGGSYTYYTDSVKGRFTISRDNSKNTLYLQMNSLKTEDTAVYYCSRHGGNFFDYWGQGTTVTVSS

SEQ ID NO: 3226 - protein, 117 aa, synthetic construct
EVQLVESGGALVKPGGSLRLSCAVSGFTFRSYGMSWVRQAPGKGLEWVALISSGGSYTYYTDSVKGRFTISRDNSKNTLYLQMNSLKTEDTAVYYCSRHGGNFFDYWGQGTTVTVSS

SEQ ID NO: 3227 - protein, 117 aa, synthetic construct
EVQLVESGGGLVQPGGSLRLSCAVSGFTFRSYGMSWVRQAPGKGLEWVALISSGGSYTYYTDSVKGRFTISRDNAKNTLYLQMNSLRAEDTAVYYCSRHGGNFFDYWGQGTTVTVSS

SEQ ID NO: 3228 - protein, 117 aa, synthetic construct
EVQLVESGGGLVQPGGSLRLSCAVSGFTFRSYGMSWVRQAPGKGLEWVALISSGGSYTYYTDSVKGRFTISRDNAKNSLYLQMNSLRAEDTAVYYCSRHGGNFFDYWGQGTTVTVSS

SEQ ID NO: 3229 - protein, 117 aa, synthetic construct
EVQLVESGGGLVQPGGSLRLSCAVSGFTFRSYGMSWVRQAPGKGLEWVALISSGGSYTYYTDSVKGRFTISRDNSKNSLYLQMNSLKTEDTAVYYCSRHGGNFFDYWGQGTTVTVSS

SEQ ID NO: 3230 - protein, 117 aa, synthetic construct
EVQLVESGGGLVQPGGSLRLSCAVSGFTFRSYGMSWVRQAPGKGLEWVALISSGGSYTYYTDSVKGRFTISRDNAKNSLYLQMNSLRAEDMAVYYCSRHGGNFFDYWGQGTTVTVSS

SEQ ID NO: 3231 - protein, 117 aa, synthetic construct
EVQLVESGGGLVQPGGSLRLSCAVSGFTFRSYGMSWVRQAPGKGLEWVALISSGGSYTYYTDSVKGQFTISRDNAKNTLYLQMNSLRAEDMAVYYCSRHGGNFFDYWGQGTTVTVSS

SEQ ID NO: 3232 - protein, 117 aa, synthetic construct
EVQLVESGGGLVKPGRSLRLSCTVSGFTFRSYGMSWVRQAPGKGLEWVALISSGGSYTYYTDSVKGRFTISRDNSKNILYLQMNSLKTEDTAVYYCSRHGGNFFDYWGQGTTVTVSS

SEQ ID NO: 3233 - protein, 117 aa, synthetic construct
EVQLVESGGGLVKPGGSLRLSCAVSGFTFRSYGMSWVRQAPGKGLEWVALISSGGSYTYYTDSVKGRFTISRDNAKNSLYLQMNSLRAEDTAVYYCSRHGGNFFDYWGQGTTVTVSS

SEQ ID NO: 3234 - protein, 117 aa, synthetic construct
EVQLVESGGGLVQPGGSLKLSCAVSGFTFRSYGMSWVRQASGKGLEWVALISSGGSYTYYTDSVKGRFTISRDNSKNTLYLQMNSLKTEDTAVYYCSRHGGNFFDYWGQGTTVTVSS

SEQ ID NO: 3235 - protein, 117 aa, synthetic construct
QVQLVESGGGVVQPGGSLRLSCAVSGFTFRSYGMSWVRQAPGKGLEWVALISSGGSYTYYTDSVKGRFTISRDNSKNTLYLQMNSLRAEDTAVYYCSRHGGNFFDYWGQGTTVTVSS

SEQ ID NO: 3236 - protein, 117 aa, synthetic construct
QVQLVESGGGVVQPGRSLRLSCAVSGFTFRSYGMSWVRQAPGKGLEWVALISSGGSYTYYTDSVKGRFTISRDNSKNTLYLQMSSLRAEDTAVYYCSRHGGNFFDYWGQGTTVTVSS

SEQ ID NO: 3237 - protein, 117 aa, synthetic construct
EVQLVESGGGLVQPGGSLRLSCPVSGFTFRSYGMSWVRQAPGKGLEWVALISSGGSYTYYTDSVKGRFTISRDNANNSLYLQMNSLRAEDTAVYYCSRHGGNFFDYWGQGTTVTVSS

SEQ ID NO: 3238 - protein, 117 aa, synthetic construct
EVQLVESGGGLVQPGRSLRLSCTVSGFTFRSYGMSWVRQAPGKGLEWVALISSGGSYTYYTDSVKGRFTISRDNSKNILYLQMNSLKTEDTAVYYCSRHGGNFFDYWGQGTTVTVSS

SEQ ID NO: 3239 - protein, 117 aa, synthetic construct
EVQLVESGGGLVQPGPSLRLSCTVSGFTFRSYGMSWVRQAPGKGLEWVALISSGGSYTYYTDSVKGRFTISRDNSKNILYLQMNSLKTEDTAVYYCSRHGGNFFDYWGQGTTVTVSS

SEQ ID NO: 3240 - protein, 117 aa, synthetic construct
EVQLVESGGGLVQPGGSLRLSCAVSGFTFRSYGMSWVRQAPGKGLEWVALISSGGSYTYYTDSVKGRFTISRDNSKNTLYLQMNSLRAEDTAVYYCSRHGGNFFDYWGQGTTVTVSS

SEQ ID NO: 3241 - protein, 117 aa, synthetic construct
EVQLVESGGGLVQPGGSLRLSCAVSGFTFRSYGMSWVRQAPGKGLEWVALISSGGSYTYYTDSVKGRFTISRDNAKNSLYLQMNSLRDEDTAVYYCSRHGGNFFDYWGQGTTVTVSS

SEQ ID NO: 3242 - protein, 117 aa, synthetic construct
QVQLVESGGGLVKPGGSLRLSCAVSGFTFRSYGMSWVRQAPGKGLEWVALISSGGSYTYYTDSVKGRFTISRDNAKNSLYLQMNSLRAEDTAVYYCSRHGGNFFDYWGQGTTVTVSS

SEQ ID NO: 3243 - protein, 117 aa, synthetic construct
QVQLVESGGGVVQPGRSLRLSCAVSGFTFRSYGMSWVRQAPGKGLEWVALISSGGSYTYYTDSVKGRFTISRDNSKNTLYLQMNSLRAEDTAVYYCSRHGGNFFDYWGQGTTVTVSS

SEQ ID NO: 3244 - protein, 117 aa, synthetic construct
EVQLLESGGGLVQPGGSLRLSCAVSGFTFRSYGMSWVRQAPGKGLEWVALISSGGSYTYYTDSVKGRFTISRDNSKNTLYLQMNSLRAEDTAVYYCSRHGGNFFDYWGQGTTVTVSS

SEQ ID NO: 3245 - protein, 117 aa, synthetic construct
EVQLVESGGGLVQPGGSLRLSCAVSGFTFRSYGMSWVRQAPGKGLEWVALISSGGSYTYYTDSVKGRFTISRHNSKNTLYLQMNSLRAEDTAVYYCSRHGGNFFDYWGQGTTVTVSS

SEQ ID NO: 3246 - protein, 117 aa, synthetic construct
EVQLVESGGGLIQPGGSLRLSCAVSGFTFRSYGMSWVRQPPGKGLEWVALISSGGSYTYYTDSVKGRFTISRDNSKNTLYLQMNSLRAEDTAVYYCSRHGGNFFDYWGQGTTVTVSS

SEQ ID NO: 3247 - protein, 117 aa, synthetic construct
EVQLVESGGGLIQPGGSLRLSCAVSGFTFRSYGMSWVRQAPGKGLEWVALISSGGSYTYYTDSVKGRFTISRDNSKNTLYLQMNSLRAEDTAVYYCSRHGGNFFDYWGQGTTVTVSS

SEQ ID NO: 3248 - protein, 117 aa, synthetic construct
EVQLVESGGGLVQPGRSLRLSCAVSGFTFRSYGMSWVRQAPGKGLEWVALISSGGSYTYYTDSVKGRFTISRDNAKNSLYLQMNSLRAEDTALYYCSRHGGNFFDYWGQGTTVTVSS

SEQ ID NO: 3249 - protein, 117 aa, synthetic construct
QVQLVESGGGVVQPGRSLRLSCAVSGFTFRSYGMSWVRQAPGKGLEWVALISSGGSYTYYTDSVKGRFTISRDNSKNRLYLQMNSLRAEDTAVYYCSRHGGNFFDYWGQGTTVTVSS

SEQ ID NO: 3250 - protein, 117 aa, synthetic construct
QVQLVESGGGVVQPGRSLRLSCAVSGFTFRSYGMSWVRQAPGKGLEWVALISSGGSYTYYTDSVKGRFTISRDNSKNTLYLQMNSLRAEGTAVYYCSRHGGNFFDYWGQGTTVTVSS

SEQ ID NO: 3251 - protein, 117 aa, synthetic construct
QVQLVESGGGVVQPGRSLRLSCAVSGFTFRSYGMSWVRQAPGKGLEWVALISSGGSYTYYTDSVKGRFAISRDNSKNTLYLQMNSLRAEDTAVYYCSRHGGNFFDYWGQGTTVTVSS

SEQ ID NO: 3252 - protein, 117 aa, synthetic construct
QVQLVDSGGGVVQPGRSLRLSCAVSGFTFRSYGMSWVRQAPGKGLEWVALISSGGSYTYYTDSVKGRFTISRDNSKNTLYLQMNSLRAEDTAVYYCSRHGGNFFDYWGQGTTVTVSS

SEQ ID NO: 3253 - protein, 117 aa, synthetic construct
EVQLVESGGGVVRPGGSLRLSCAVSGFTFRSYGMSWVRQAPGKGLEWVALISSGGSYTYYTDSVKGRFTISRDNAKNSLYLQMNSLRAEDTALYHCSRHGGNFFDYWGQGTTVTVSS

SEQ ID NO: 3254 - protein, 117 aa, synthetic construct
EVQLVESGGVVVQPGGSLRLSCAVSGFTFRSYGMSWVRQAPGKGLEWVALISSGGSYTYYTDSVKGRFTISRDNSKNSLYLQMNSLRAEDTALYYCSRHGGNFFDYWGQGTTVTVSS

SEQ ID NO: 3255 - protein, 117 aa, synthetic construct
EVQLVESGGGVVQPGGSLRLSCAVSGFTFRSYGMSWVRQAPGKGLEWVALISSGGSYTYYTDSVKGRFTISRDNSKNSLYLQMNSLRTEDTALYYCSRHGGNFFDYWGQGTTVTVSS

SEQ ID NO: 3256 - protein, 117 aa, synthetic construct
EVQLVESGGVVVQPGGSLRLSCAVSGFTFRSYGMSWVRQAPGKGLEWVALISSGGSYTYYTDSVKGRFTISRDNSKNSLYLQMNSLRTEDTALYYCSRHGGNFFDYWGQGTTVTVSS

SEQ ID NO: 3257 - protein, 117 aa, synthetic construct
EVQLVETGGGLIQPGGSLRLSCAVSGFTFRSYGMSWVRQAPGKGLEWVALISSGGSYTYYTDSVKGRFTISRDNSKNTLYLQMNSLRAEDTAVYYCSRHGGNFFDYWGQGTTVTVSS

SEQ ID NO: 3258 - protein, 117 aa, synthetic construct
EVQLVESGGGLVQPGGSLRLSCAVSGFTFRSYGMSWVRQATGKGLEWVALISSGGSYTYYTDSVKGRFTISRENAKNSLYLQMNSLRAGDTAVYYCSRHGGNFFDYWGQGTTVTVSS

SEQ ID NO: 3259 - protein, 117 aa, synthetic construct
EVQLVESRGVLVQPGGSLRLSCAVSGFTFRSYGMSWVRQAPGKGLEWVALISSGGSYTYYTDSVKGRFTISRDNSKNTLHLQMNSLRAEDTAVYYCSRHGGNFFDYWGQGTTVTVSS

SEQ ID NO: 3260 - protein, 117 aa, synthetic construct
EVQLVESGGGLVQPGRSLRLSCAVSGFTFRSYGMSWVRQAPGKGLEWVALISSGGSYTYYTDSVKGRFTISRDNAKNSLYLQMNSLRAEDMALYYCSRHGGNFFDYWGQGTTVTVSS

SEQ ID NO: 3261 - protein, 117 aa, synthetic construct
QVQLVESGGGLVQPGGSLRLSCSVSGFTFRSYGMSWVRQAPGKGLEWVALISSGGSYTYYTDSVKGRFTISRDNSKNTLYLQMNSLRAEDTAVYYCSRHGGNFFDYWGQGTTVTVSS

SEQ ID NO: 3262 - protein, 117 aa, synthetic construct
EVQLVESGGGLVQPGGSLRLSCSVSGFTFRSYGMSWVRQAPGKGLEWVALISSGGSYTYYTDSVKGRFTISRDNSKNTLYLQMSSLRAEDTAVYYCSRHGGNFFDYWGQGTTVTVSS

SEQ ID NO: 3263 - protein, 117 aa, synthetic construct
QVQLVESGGGVVQPGRSLRLSCAVSGFTFRSYGMSWVRQAPGKGLEWVALISSGGSYTYYTDSVKGRFTISRDNSTNTLFLQMNSLRAEDTAVYYCSRHGGNFFDYWGQGTTVTVSS

SEQ ID NO: 3264 - protein, 117 aa, synthetic construct
QVQLLESGGGLVKPGGSLRLSCAVSGFTFRSYGMSWVRQAPGKGLEWVALISSGGSYTYYTDSVKGRFTISRDNAKNSLYLQMNSLRAEDTAVYYCSRHGGNFFDYWGQGTTVTVSS

SEQ ID NO: 3265 - protein, 117 aa, synthetic construct
EVQLVESGEGLVQPGGSLRLSCAVSGFTFRSYGMSWVRQAPGKGLEWVALISSGGSYTYYTDSVKGRFTISRDNSKNTLYLQMGSLRAEDMAVYYCSRHGGNFFDYWGQGTTVTVSS

SEQ ID NO: 3266 - protein, 117 aa, synthetic construct
EVQLVESGGGLVQPGGSLRLSCAVSGFTFRSYGMSWVRQAPGKGLEWVALISSGGSYTYYTDSVKGRFTISRDNSKNTLYLQMGSLRAEDMAVYYCSRHGGNFFDYWGQGTTVTVSS

SEQ ID NO: 3267 - protein, 117 aa, synthetic construct
EVQLVESGGGLVQPGGSLRLSCSVSGFTFRSYGMSWVRQAPGKGLEWVALISSGGSYTYYTDSVKGRFTISRDNSKNTLYVQMSSLRAEDTAVYYCSRHGGNFFDYWGQGTTVTVSS

SEQ ID NO: 3268 - protein, 117 aa, synthetic construct
EVQLVESGGGLVQPGGSLRLSCAVSGFTFRSYGMSWVRQAPGKGLEWVALISSGGSYTYYTDSVKGRFIISRDNSRNSLYLQKNRRRAEDMAVYYCSRHGGNFFDYWGQGTTVTVSS

SEQ ID NO: 3269 - protein, 117 aa, synthetic construct
EVQLVESGGGLVQPGGSLRLSCAVSGFTFRSYGMSWVHQAPGKGLEWVALISSGGSYTYYTDSVKGRFIISRDNSRNTLYLQTNSLRAEDTAVYYCSRHGGNFFDYWGQGTTVTVSS

SEQ ID NO: 3270 - protein, 117 aa, synthetic construct
EVHLVESGGGLVQPGGALRLSCAVSGFTFRSYGMSWVRQATGKGLEWVALISSGGSYTYYTDSVKGRFTISRENAKNSLYLQMNSLRAGDTAVYYCSRHGGNFFDYWGQGTTVTVSS

SEQ ID NO: 3271 - protein, 117 aa, synthetic construct
EVQLVESGGGLVQPRGSLRLSCAVSGFTFRSYGMSWVRQAPGKGLEWVALISSGGSYTYYTDSVKGRFTISRDNSKNTLYLQMNNLRAEGTAVYYCSRHGGNFFDYWGQGTTVTVSS

SEQ ID NO: 3272 - protein, 117 aa, synthetic construct
EVQLVESGGGLVQPRGSLRLSCAVSGFTFRSYGMSWVRQAPGKGLEWVALISSGGSYTYYTDSVKGRFTISRDNSKNTLYLQMNNLRAEGTAAYYCSRHGGNFFDYWGQGTTVTVSS

SEQ ID NO: 3273 - protein, 117 aa, synthetic construct
QVQLVQSGAEVKKPGASVKVSCKVSGFTFRSYGMSWVRQAPGKGLEWVALISSGGSYTYYTDSVKGRFTITRDNSTNTLYMELSSLRSEDTAVYYCSRHGGNFFDYWGQGTTVTVSS

SEQ ID NO: 3274 - protein, 117 aa, synthetic construct
QVQLVQSGSELKKPGASVKVSCKVSGFTFRSYGMSWVRQAPGQGLEWVALISSGGSYTYYTDSVKGRFVISRDNSVNTLYLQISSLKAEDTAVYYCSRHGGNFFDYWGQGTTVTVSS

SEQ ID NO: 3275-3277 - skipped (3 entries)

SEQ ID NO: 3278 - protein, 469 aa, synthetic construct
METDTLLLWVLLLWVPGSTGQVQLVQSGAEVKKPGSSVKVSCKASGYSFTTYYIHWVRQAPGQGLEWMGWFFPGSGNIKYNEKFKGRVTITADTSTSTAYMELSSLRSEDTAVYYCAGSYYSYDVLDYWGQGTTVTVSSASTKGPSVFPLAPSSKSTSGGTAALGCLVKDYFPEPVTVSWNSGALTSGVHTFPAVLQSSGLYSLSSVVTVPSSSLGTQTYICNVNHKPSNTKVDKRVEPKSCDKTHTCPPCPAPELLGGPSVFLFPPKPKDTLMISRTPEVTCVVVDVSHEDPEVKFNWYVDGVEVHNAKTKPREEQYNSTYRVVSVLTVLHQDWLNGKEYKCKVSNKALPAPIEKTISKAKGQPREPQVYTLPPSREEMTKNQVSLTCLVKGFYPSDIAVEWESNGQPENNYKTTPPVLDSDGSFFLYSKLTVDKSRWQQGNVFSCSVMHEALHNHYTQKSLSLSPGK

SEQ ID NO: 3279 - protein, 234 aa, synthetic construct
METDTLLLWVLLLWVPGSTGDIQMTQSPSSLSASVGDRVTITCKASQNVGINVVWHQQKPGKVPKALIYSSSHRYSGVPSRFSGSGSGTDFTLTISSLQPEDVATYFCQQFKSYPLTFGQGTKLEIKRTVAAPSVFIFPPSDEQLKSGTASVVCLLNNFYPREAKVQWKVDNALQSGNSQESVTEQDSKDSTYSLSSTLTLSKADYEKHKVYACEVTHQGLSSPVTKSFNRGEC

SEQ ID NO: 3280 - protein, 247 aa, synthetic construct
METDTLLLWVLLLWVPGSTGDKTHTCPPCPAPELLGGPSVFLFPPKPKDTLMISRTPEVTCVVVDVSHEDPEVKFNWYVDGVEVHNAKTKPREEQYNSTYRVVSVLTVLHQDWLNGKEYKCKVSNKALPAPIEKTISKAKGQPREPQVYTLPPCREEMTKNQVSLWCLVKGFYPSDIAVEWESNGQPENNYKTTPPVLDSDGSFFLYSKLTVDKSRWQQGNVFSCSVMHEALHNRFTQKSLSLSPGK

SEQ ID NO: 3281 - protein, 520 aa, synthetic construct
METDTLLLWVLLLWVPGSTGEVQLVESGGGLVQPGGSLRLSCAASGFTFSNFGMHWVRQAPGKGLEWVSYISSGSSTIYYADTLKGRFTISRDNSKNTLYLQMNSLRAEDTAVYYCARRGEGAMDYWGQGTTVTVSSGGGGSGGGGSGGGGSGGGGSDNQLTQSPSFLSASVGDRVTITCRASSSVNYIYWYQQKPGKAPKLLIYYTSNLAPGVPSRFSGSGSGNEYTLTISSLQPEDFATYYCQQFTSSPFTFGQGTKLEIKGGGGSDKTHTCPPCPAPELLGGPSVFLFPPKPKDTLMISRTPEVTCVVVDVSHEDPEVKFNWYVDGVEVHNAKTKPREEQYNSTYRVVSVLTVLHQDWLNGKEYKCKVSNKALPAPIEKTISKAKGQPREPQVCTLPPSREEMTKNQVSLSCAVKGFYPSDIAVEWESNGQPENNYKTTPPVLDSDGSFFLVSKLTVDKSRWQQGNVFSCSVMHEALHNHYTQKSLSLSPGKGGGGSGGGGSGLNDIFEAQKIEWHE

SEQ ID NO: 3282-3283 - skipped (2 entries)

SEQ ID NO: 3284 - protein, 469 aa, synthetic construct
METDTLLLWVLLLWVPGSTGQVQLQQSGPELVKPGASVKISCKASGYAFSSSWMNWVKQRPGQGLEWIGRIYPGDGDTKYNGKFKGKATLTADKSSSTAYMHLSSLTSVDSAVYFCARRGTGGWYFDVWGAGTTVTVSSAKTTAPSVYPLAPVCGDTTGSSVTLGCLVKGYFPEPVTLTWNSGSLSSGVHTFPAVLQSDLYTLSSSVTVTSSTWPSQSITCNVAHPASSTKVDKKIEPRGPTIKPCPPCKCPAPNLLGGPSVFIFPPKIKDVLMISLSPIVTCVVVDVSEDDPDVQISWFVNNVEVHTAQTQTHREDYNSTLRVVSALPIQHQDWMSGKEFKCKVNNKDLPAPIERTISKPKGSVRAPQVYVLPPPEEEMTKKQVTLTCMVTDFMPEDIYVEWTNNGKTELNYKNTEPVLDSDGSYFMYSKLRVEKKNWVERNSYSCSVVHEGLHNHHTTKSFSRTPGK

SEQ ID NO: 3285 - protein, 238 aa, synthetic construct
METDTLLLWVLLLWVPGSTGDIVLTQSPASLAVSLGQRATISCRASESVDSSGNSFMHWYQQKPGQPPQLLIYRASNLESGIPARFSGSGSRTDFTLTINPVEADDVATFYCQQSFDDPFTFGSGTKLEIKRADAAPTVSIFPPSSEQLTSGGASVVCFLNNFYPKDINVKWKIDGSERQNGVLNSWTDQDSKDSTYSMSSTLTLTKDEYERHNSYTCEATHKTSTSPIVKSFNRNEC

SEQ ID NO: 3286-3288 - skipped (3 entries)

SEQ ID NO: 3289 - protein, 107 aa, synthetic construct
  VARIANT 30: note = G, E, A or D
  VARIANT 32: note = R or K
  VARIANT 36: note = Y or H
  VARIANT 56: note = K or S
DIQMTQSPSFLSASVGDRVTITCKASQNVXBXVAWXQQKPGKAPKALIYSSSHRYXGVPSRFSGSGSGTEFTLTISSLQPEDFATYFCQQFKSYPLTFGQGTKLEIK

SEQ ID NO: 3290 - protein, 119 aa, synthetic construct
  VARIANT 27: note = H, T, G or Y
  VARIANT 28: note = D, T or S
  VARIANT 30: note = H, R, D, K or T
  VARIANT 31: note = L, D, K, T or N
  VARIANT 32: note = W, F, T, I, Y or G
  VARIANT 50: note = R or W
  VARIANT 51: note = V, I or F
  VARIANT 52: note = F, S or Y
  VARIANT 53: note = A or P
  VARIANT 57: note = N or S
  VARIANT 58: note = T, V, Y or I
  VARIANT 59: note = K or R
  VARIANT 98: note = G or V
  VARIANT 100: note = Y or I
  VARIANT 103: note = Y or A
  VARIANT 104: note = D or G
QVQLVQSGAEVKKPGSSVKVSCKASGXXFXXXYIHWVRQAPGQGLEWMGXXXXGSGXXXYNEKFKGRVTITADTSTSTAYMELSSLRSEDTAVYYCAXSXYSXXVLDYWGQGTTVTVSS

SEQ ID NO: 3291-3307 - skipped (17 entries)

SEQ ID NO: 3308 - protein, 10 aa, synthetic construct
GGGGSGGGGS

SEQ ID NO: 3309-3317 - skipped (9 entries)

SEQ ID NO: 3318 - protein, 449 aa, synthetic construct
QVQLVQSGAEVKKPGASVKVSCKASGFNIKSAYMHWVRQAPGQEPGCMGRIDPATGKTKYAPKFQARVTMTADTSINTAYTELSSLRSEDTATYYCARSLNWDYGLDYWGQGTLVTVSSASTKGPSVFPLAPSSKSTSGGTAALGCLVKDYFPEPVTVSWNSGALTSGVHTFPAVLQSSGLYSLSSVVTVPSSSLGTQTYICNVNHKPSNTKVDKRVEPKSCDKTHTCPPCPAPELLGGPSVFLFPPKPKDTLMISRTPEVTCVVVDVSHEDPEVKFNWYVDGVEVHNAKTKPREEQYASTYRVVSVLTVLHQDWLNGKEYKCKVSNKALPAPIEKTISKAKGQPREPQVCTLPPSREEMTKNQVSLSCAVKGFYPSDIAVEWESNGQPENNYKTTPPVLDSDGSFFLVSKLTVDKSRWQQGNVFSCSVMHEALHNHYTQKSLSLSPGK

SEQ ID NO: 3319 - protein, 218 aa, synthetic construct
EIVLTQSPATLSLSPGERATLSCRASKSVSILGTHLIHWYQQKPGLAPRLLIYAASNLESGIPDRFSGSGSETDFTLTISRLEPEDFAVYFCQQSIEDPWTFGGGTKVEIKRTVAAPSVFIFPPSDEQLKSGTASVVCLLNNFYPREAKVQWKVDNALQSGNSQESVTEQDSKDSTYSLSSTLTLSKADYEKHKVYACEVTHQGLSSPVTKSFNRGEC

SEQ ID NO: 3320 - skipped

SEQ ID NO: 3321 - protein, 10 aa, synthetic construct
GFNIKSAYMH

SEQ ID NO: 3322 - protein, 17 aa, synthetic construct
RIDPATGKTKYAPKFQA

SEQ ID NO: 3323 - protein, 10 aa, synthetic construct
SLNWDYGLDY

SEQ ID NO: 3324 - protein, 15 aa, synthetic construct
RASKSVSILGTHLIH

SEQ ID NO: 3325 - protein, 7 aa, synthetic construct
AASNLES

SEQ ID NO: 3326 - protein, 9 aa, synthetic construct
QQSIEDPWT

SEQ ID NO: 3327 - skipped

SEQ ID NO: 3328 - protein, 449 aa, synthetic construct
QVQLVQSGAEVKKPGASVKVSCKASGFNIKSAYMHWVRQAPGQGLEWMGRIDPATGKTKYAPKFQARVTMTADTSTNTAYMELSSLRSEDTAVYYCARSLNWDYGLDYWGQGTLVTVSSASTKGPSVFPLAPSSKSTSGGTAALGCLVKDYFPEPVTVSWNSGALTSGVHTFPAVLQSSGLYSLSSVVTVPSSSLGTQTYICNVNHKPSNTKVDKRVEPKSCDKTHTCPPCPAPELLGGPSVFLFPPKPKDTLMISRTPEVTCVVVDVSHEDPEVKFNWYVDGVEVHNAKTKPREEQYASTYRVVSVLTVLHQDWLNGKEYKCKVSNKALPAPIEKTISKAKGQPREPQVCTLPPSREEMTKNQVSLSCAVKGFYPSDIAVEWESNGQPENNYKTTPPVLDSDGSFFLVSKLTVDKSRWQQGNVFSCSVMHEALHNHYTQKSLSLSPGK

SEQ ID NO: 3329 - protein, 218 aa, synthetic construct
EIVLTQSPGTLSLSPGERATLSCRASKSVSILGTHLIHWYQQKPGQAPRLLIYAASNLESGIPDRFSGSGSETDFTLTISRLEPEDFAVYFCQQSIEDPWTFGGGTKVEIKRTVAAPSVFIFPPSDEQLKSGTASVVCLLNNFYPREAKVQWKVDNALQSGNSQESVTEQDSKDSTYSLSSTLTLSKADYEKHKVYACEVTHQGLSSPVTKSFNRGEC

SEQ ID NO: 3330-3337 - skipped (8 entries)

SEQ ID NO: 3338 - protein, 448 aa, synthetic construct
QVQLVQSGAEVKKPGASVKVSCKASGYTFTDYNIHWVRQAPGQGLEWMGYINPYNGRTGYNQKFKARVTMTVDKSTSTAYMELSSLRSEDTAVYYCARWDGSSYFDYWGQGTLVTVSSASTKGPSVFPLAPSSKSTSGGTAALGCLVKDYFPEPVTVSWNSGALTSGVHTFPAVLQSSGLYSLSSVVTVPSSSLGTQTYICNVNHKPSNTKVDKRVEPKSCDKTHTCPPCPAPELLGGPSVFLFPPKPKDTLMISRTPEVTCVVVDVSHEDPEVKFNWYVDGVEVHNAKTKPREEQYASTYRVVSVLTVLHQDWLNGKEYKCKVSNKALPAPIEKTISKAKGQPREPQVCTLPPSREEMTKNQVSLSCAVKGFYPSDIAVEWESNGQPENNYKTTPPVLDSDGSFFLVSKLTVDKSRWQQGNVFSCSVMHEALHNHYTQKSLSLSPGK

SEQ ID NO: 3339 - protein, 213 aa, synthetic construct
EIVLTQSPATLSVSPGERATLSCSASSSVSYMHWYQQKPGQAPRPLIYEISKLASGIPARFSGSGSGTEYTLTISSLQSEDFAVYYCQQWNYPLLTFGQGTKLEIKRTVAAPSVFIFPPSDEQLKSGTASVVCLLNNFYPREAKVQWKVDNALQSGNSQESVTEQDSKDSTYSLSSTLTLSKADYEKHKVYACEVTHQGLSSPVTKSFNRGEC

SEQ ID NO: 3340 - protein, 370 aa, synthetic construct
APTSSSTKKTQLQLEHLLLDLQMILNGINNYKNPKLTRMLTFKFYMPKKATELKHLQCLEEELKPLEEVLNLAQSKNFHLRPRDLISNINVIVLELKGSETTFMCEYADETATIVEFLNRWITFAQSIISTLTGGGGSGGGGSDKTHTCPPCPAPELLGGPSVFLFPPKPKDTLMISRTPEVTCVVVDVSHEDPEVKFNWYVDGVEVHNAKTKPREEQYASTYRVVSVLTVLHQDWLNGKEYKCKVSNKALPAPIEKTISKAKGQPREPQVYTLPPCREEMTKNQVSLWCLVKGFYPSDIAVEWESNGQPENNYKTTPPVLDSDGSFFLYSKLTVDKSRWQQGNVFSCSVMHEALHNHYTQKSLSLSPGK

SEQ ID NO: 3341 - protein, 10 aa, synthetic construct
GYTFTDYNIH

SEQ ID NO: 3342 - protein, 17 aa, synthetic construct
YINPYNGRTGYNQKFKA

SEQ ID NO: 3343 - protein, 9 aa, synthetic construct
WDGSSYFDY

SEQ ID NO: 3344 - protein, 10 aa, synthetic construct
SASSSVSYMH

SEQ ID NO: 3345 - protein, 7 aa, synthetic construct
EISKLAS

SEQ ID NO: 3346 - protein, 9 aa, synthetic construct
QQWNYPLLT

SEQ ID NO: 3347 - skipped

SEQ ID NO: 3348 - protein, 447 aa, synthetic construct
QVQLVQSGAEVKKPGSSVKVSCKASGHDFRLTYIHWVRQAPGQGLEWMGRVSAGSGNVKYNEKFKGRVTITADTSTSTAYMELSSLRSEDTAVYYCAVSYYSYDVLDYWGQGTTVTVSSASTKGPSVFPLAPSSKSTSGGTAALGCLVKDYFPEPVTVSWNSGALTSGVHTFPAVLQSSGLYSLSSVVTVPSSSLGTQTYICNVNHKPSNTKVDKRVEPKSCDKTHTCPPCPAPELLGGPSVFLFPPKPKDTLMISRTPEVTCVVVDVSHEDPEVKFNWYVDGVEVHNAKTKPREEQYASTYRVVSVLTVLHQDWLNGKEYKCKVSNKALPAPIEKTISKAKGQPREPQVCTLPPSREEMTKNQVSLSCAVKGFYPSDIAVEWESNGQPENNYKTTPPVLDSDGSFFLVSKLTVDKSRWQQGNVFSCSVMHEALHNHYTQKSLSLSP

SEQ ID NO: 3349 - protein, 214 aa, synthetic construct
DIQMTQSPSFLSASVGDRVTITCKASQNVADRVVWHQQKPGKAPKALIYSSSHRYKGVPSRFSGSGSGTEFTLTISSLQPEDFATYFCQQFKSYPLTFGQGTKLEIKRTVAAPSVFIFPPSDEQLKSGTASVVCLLNNFYPREAKVQWKVDNALQSGNSQESVTEQDSKDSTYSLSSTLTLSKADYEKHKVYACEVTHQGLSSPVTKSFNRGEC

SEQ ID NO: 3350 - protein, 368 aa, synthetic construct
APTSSSTKKTQLQLEHLLLDLQMILNGINNYKNPKLTRMLTFKFYMPKKATELKHLQCLEEELKPLEEVLNLAQSKNFHLRPRDLISNINVIVLELKGSETTFMCEYADETATIVEFLNRWITFAQSIISTLTGGGGSGGGGSDKTHTCPPCPAPELLGGPSVFLFPPKPKDTLMISRTPEVTCVVVDVSHEDPEVKFNWYVDGVEVHNAKTKPREEQYASTYRVVSVLTVLHQDWLNGKEYKCKVSNKALPAPIEKTISKAKGQPREPQVYTLPPCREEMTKNQVSLWCLVKGFYPSDIAVEWESNGQPENNYKTTPPVLDSDGSFFLYSKLTVDKSRWQQGNVFSCSVMHEALHNHYTQKSLSLSP

SEQ ID NO: 3351 - protein, 10 aa, synthetic construct
GHDFRLTYIH

SEQ ID NO: 3352 - protein, 17 aa, synthetic construct
RVSAGSGNVKYNEKFKG

SEQ ID NO: 3353 - protein, 10 aa, synthetic construct
SYYSYDVLDY

SEQ ID NO: 3354 - protein, 11 aa, synthetic construct
KASQNVADRVV

SEQ ID NO: 3355 - protein, 7 aa, synthetic construct
SSSHRYK

SEQ ID NO: 3356 - protein, 9 aa, synthetic construct
QQFKSYPLT

SEQ ID NO: 3357 - skipped

SEQ ID NO: 3358 - protein, 451 aa, synthetic construct
QIQLQQSGPEVVKPGASVQISCKASGYTFSGSWMNWVKQRPGKGLEWIGRIYPGDGDTDYSGKFKGRATLTADKSSSTAYMRLSSLTSEDSAVYFCARSGYFNYVPVFDYWGQGTTLSVSSASTKGPSVFPLAPSSKSTSGGTAALGCLVKDYFPEPVTVSWNSGALTSGVHTFPAVLQSSGLYSLSSVVTVPSSSLGTQTYICNVNHKPSNTKVDKRVEPKSCDKTHTCPPCPAPELLGGPSVFLFPPKPKDTLMISRTPEVTCVVVDVSHEDPEVKFNWYVDGVEVHNAKTKPREEQYASTYRVVSVLTVLHQDWLNGKEYKCKVSNKALPAPIEKTISKAKGQPREPQVCTLPPSREEMTKNQVSLSCAVKGFYPSDIAVEWESNGQPENNYKTTPPVLDSDGSFFLVSKLTVDKSRWQQGNVFSCSVMHEALHNHYTQKSLSLSPGK

SEQ ID NO: 3359 - protein, 212 aa, synthetic construct
QIVLTQSPAIMSASLGEEIALTCSANSTVGYIHWYQQKSGTSPKLLIYTTSNLASGVPSRFSGSGSGTFYSLTISSVEAEDAADYFCHQWSFYPTFGGGTKLEIKRTVAAPSVFIFPPSDEQLKSGTASVVCLLNNFYPREAKVQWKVDNALQSGNSQESVTEQDSKDSTYSLSSTLTLSKADYEKHKVYACEVTHQGLSSPVTKSFNRGEC

SEQ ID NO: 3360-3367 - skipped (8 entries)

SEQ ID NO: 3368 - protein, 450 aa, synthetic construct
NVQLQESGPGLVKPSQSLSLTCSVAGYSITSGYFWNWIRQFPGNKLEWMGYISYDGSNNYNPSLKNRISITRDTSKNQFFLKLNSVTTEDTATYYCASPSPGTGYAVDYWGQGTSVTVSSASTKGPSVFPLAPSSKSTSGGTAALGCLVKDYFPEPVTVSWNSGALTSGVHTFPAVLQSSGLYSLSSVVTVPSSSLGTQTYICNVNHKPSNTKVDKRVEPKSCDKTHTCPPCPAPELLGGPSVFLFPPKPKDTLMISRTPEVTCVVVDVSHEDPEVKFNWYVDGVEVHNAKTKPREEQYASTYRVVSVLTVLHQDWLNGKEYKCKVSNKALPAPIEKTISKAKGQPREPQVCTLPPSREEMTKNQVSLSCAVKGFYPSDIAVEWESNGQPENNYKTTPPVLDSDGSFFLVSKLTVDKSRWQQGNVFSCSVMHEALHNHYTQKSLSLSPGK

SEQ ID NO: 3369 - protein, 219 aa, synthetic construct
NVVMTQTPLSLPVSLGDQASISCRSSQSLVHSNGNTYLHWYLQKPGQSPKFLIYKVSNRFSGVPDRFSGGGSGTEFTLKISRVEAEDLGVYFCSQSTHVPFTFGSGTKLEIKRTVAAPSVFIFPPSDEQLKSGTASVVCLLNNFYPREAKVQWKVDNALQSGNSQESVTEQDSKDSTYSLSSTLTLSKADYEKHKVYACEVTHQGLSSPVTKSFNRGEC

SEQ ID NO: 3370 - skipped

SEQ ID NO: 3371 - protein, 9 aa, synthetic construct
SITSGYFWN

SEQ ID NO: 3372 - protein, 16 aa, synthetic construct
YISYDGSNNYNPSLKN

SEQ ID NO: 3373 - protein, 11 aa, synthetic construct
PSPGTGYAVDY

SEQ ID NO: 3374 - protein, 16 aa, synthetic construct
RSSQSLVHSNGNTYLH

SEQ ID NO: 3375 - protein, 7 aa, synthetic construct
KVSNRFS

SEQ ID NO: 3376 - protein, 9 aa, synthetic construct
SQSTHVPFT

SEQ ID NO: 3377 - skipped

SEQ ID NO: 3378 - protein, 451 aa, synthetic construct
QVQLQQPGAELVRPGASVKLSCKASGYTFTNYWMNWVKQRPGQGLEWIGMIHPSDSATRLNQKFKDKATLTVDKSSSTAYMQLSSPTSEDSAVYYCARWAYYGNLYAIDYWGQGTSVTVSSAKTTAPSVYPLAPVCGDTTGSSVTLGCLVKGYFPEPVTLTWNSGSLSSGVHTFPAVLQSDLYTLSSSVTVTSSTWPSQSITCNVAHPASSTKVDKKIEPRGPTIKPCPPCKCPAPNAAGGPSVFIFPPKIKDVLMISLSPIVTCVVVDVSEDDPDVQISWFVNNVEVHTAQTQTHREDYNSTLRVVSALPIQHQDWMSGKEFKCKVNNKDLGAPIERTISKPKGSVRAPQVCVLPPPEEEMTKKQVTLSCAVTDFMPEDIYVEWTNNGKTELNYKNTEPVLDSDGSYFMVSKLRVEKKNWVERNSYSCSVVHEGLHNHHTTKSFSRTPGK

SEQ ID NO: 3379 - protein, 218 aa, synthetic construct
DIVLTQSPASLAVSLGQRATISCKASQSVDYDGYSYMHWFQQKPGQPPKLLIYAASNLESGIPARFIGSGSGTDFTLNIHPVEEEDAATYYCQQSNEDPWTFGGGTKLEIKRADAAPTVSIFPPSSEQLTSGGASVVCFLNNFYPKDINVKWKIDGSERQNGVLNSWTDQDSKDSTYSMSSTLTLTKDEYERHNSYTCEATHKTSTSPIVKSFNRNEC

SEQ ID NO: 3380 - protein, 371 aa, synthetic construct
APTSSSTKKTQLQLEHLLLDLQMILNGINNYKNPKLTRMLTFKFYMPKKATELKHLQCLEEELKPLEEVLNLAQSKNFHLRPRDLISNINVIVLELKGSETTFMCEYADETATIVEFLNRWITFCQSIISTLTGGGGSGGGGSTIKPCPPCKCPAPNAAGGPSVFIFPPKIKDVLMISLSPIVTCVVVDVSEDDPDVQISWFVNNVEVHTAQTQTHREDYNSTLRVVSALPIQHQDWMSGKEFKCKVNNKDLGAPIERTISKPKGSVRAPQVYVLPPCEEEMTKKQVTLWCMVTDFMPEDIYVEWTNNGKTELNYKNTEPVLDSDGSYFMYSKLRVEKKNWVERNSYSCSVVHEGLHNHHTTKSFSRTPGK

SEQ ID NO: 3381 - protein, 10 aa, synthetic construct
GYTFTNYWMN

SEQ ID NO: 3382 - protein, 17 aa, synthetic construct
MIHPSDSATRLNQKFKD

SEQ ID NO: 3383 - protein, 12 aa, synthetic construct
WAYYGNLYAIDY

SEQ ID NO: 3384 - protein, 15 aa, synthetic construct
KASQSVDYDGYSYMH

SEQ ID NO: 3385 - skipped

SEQ ID NO: 3386 - protein, 9 aa, synthetic construct
QQSNEDPWT

SEQ ID NO: 3387 - skipped

SEQ ID NO: 3388 - protein, 451 aa, synthetic construct
EVQLVESGGGLVQPGASLKLSCVASGFTFSDYWMSWVRQTPGKTMEWIGNIKYDGSHTNYAPSLKNRFTISRDNAKSTLFLQMSNVRSEDTATYYCTRESHYGYIYPFDYWGQGVMVTVSSAKTTAPSVYPLAPVCGDTTGSSVTLGCLVKGYFPEPVTLTWNSGSLSSGVHTFPAVLQSDLYTLSSSVTVTSSTWPSQSITCNVAHPASSTKVDKKIEPRGPTIKPCPPCKCPAPNAAGGPSVFIFPPKIKDVLMISLSPIVTCVVVDVSEDDPDVQISWFVNNVEVHTAQTQTHREDYNSTLRVVSALPIQHQDWMSGKEFKCKVNNKDLGAPIERTISKPKGSVRAPQVCVLPPPEEEMTKKQVTLSCAVTDFMPEDIYVEWTNNGKTELNYKNTEPVLDSDGSYFMVSKLRVEKKNWVERNSYSCSVVHEGLHNHHTTKSFSRTPGK

SEQ ID NO: 3389 - protein, 214 aa, synthetic construct
DIQMTQSPSSMSVSLGDTVTITCRASQDVGIYVNWFQQKPGKSPRRMIYRATNLADGVPSRFSGSRSGSDYSLTISSLESEDVADYHCLQYDESPFTFGSGTKLEIKRADAAPTVSIFPPSSEQLTSGGASVVCFLNNFYPKDINVKWKIDGSERQNGVLNSWTDQDSKDSTYSMSSTLTLTKDEYERHNSYTCEATHKTSTSPIVKSFNRNEC

SEQ ID NO: 3390 - protein, 371 aa, synthetic construct; identical to SEQ ID NO: 3380

SEQ ID NO: 3391 - protein, 10 aa, synthetic construct
GFTFSDYWMS

SEQ ID NO: 3392 - protein, 17 aa, synthetic construct
NIKYDGSHTNYAPSLKN

SEQ ID NO: 3393 - protein, 12 aa, synthetic construct
ESHYGYIYPFDY

SEQ ID NO: 3394 - protein, 11 aa, synthetic construct
RASQDVGIYVN

SEQ ID NO: 3395 - protein, 7 aa, synthetic construct
RATNLAD

SEQ ID NO: 3396 - protein, 9 aa, synthetic construct
LQYDESPFT

SEQ ID NO: 3397 - skipped

SEQ ID NO: 3398 - protein, 452 aa, synthetic construct
QVQLQQSGTELMKPGASVKISCKASGYTFSNYWIEWIKQRPGHGLEWVGEILPGAGPTNYNEKFKGKATFTADSSSNTAYMQLSSLTSEDSAVYYCARTDYDYDWFAYWGQGTLVTVSAAKTTAPSVYPLAPVSGDTTGSSVTLGCLVKGYFPEPVTLTWNSGSLSSGVHTFPAVLQSDLYTLSSSVTVTSSTWPSQSITCNVAHPASSTKVDKKIEPKSCDKTHTCPPCPAPNAAGGPSVFIFPPKIKDVLMISLSPIVTCVVVDVSEDDPDVQISWFVNNVEVHTAQTQTHREDYNSTLRVVSALPIQHQDWMSGKEFKCKVNNKDLGAPIERTISKPKGSVRAPQVCVLPPPEEEMTKKQVTLSCAVTDFMPEDIYVEWTNNGKTELNYKNTEPVLDSDGSYFMVSKLRVEKKNWVERNSYSCSVVHEGLHNHHTTKSFSRTPGKEPEA

SEQ ID NO: 3399 - protein, 220 aa, synthetic construct
DIVMSQSPSSLAVSVGEKVTMSCKSSQSLLYSGNQKNYLAWYQQKPGQSPKLLIYWASTRESGVPDRFTGSGSGTDFTLTINSVKAEDLTVYYCQQYYGYPRTFGGGTKVEIKRADAAPTVSIFPPSSEQLTSGGASVVCFLNNFYPKDINVKWKIDGSERQNGVLNSWTDQDSKDSTYSMSSTLTLTKDEYERHNSYTCEATHKTSTSPIVKSFNRNEC

SEQ ID NO: 3400 - protein, 383 aa, synthetic construct
APTSSSTKKTQLQLEHLLLDLQMILNGINNYKNPKLTRMLTFKFYMPKKATELKHLQCLEEELKPLEEVLNLAQSKNFHLRPRDLISNINVIVLELKGSETTFMCEYADETATIVEFLNRWITFCQSIISTLTGGGGSGGGGSDKTHTCPPCPAPNAAGGPSVFIFPPKIKDVLMISLSPIVTCVVVDVSEDDPDVQISWFVNNVEVHTAQTQTHREDYNSTLRVVSALPIQHQDWMSGKEFKCKVNNKDLGAPIERTISKPKGSVRAPQVYVLPPCEEEMTKKQVTLWCMVTDFMPEDIYVEWTNNGKTELNYKNTEPVLDSDGSYFMYSKLRVEKKNWVERNSYSCSVVHEGLHNHHTTKSFSRTPGKGGGGSHHHHHHHH

SEQ ID NO: 3401 - protein, 10 aa, synthetic construct
GYTFSNYWIE

SEQ ID NO: 3402 - protein, 17 aa, synthetic construct
EILPGAGPTNYNEKFKG

SEQ ID NO: 3403 - protein, 10 aa, synthetic construct
TDYDYDWFAY

SEQ ID NO: 3404 - protein, 17 aa, synthetic construct
KSSQSLLYSGNQKNYLA

SEQ ID NO: 3405 - protein, 7 aa, synthetic construct
WASTRES

SEQ ID NO: 3406 - protein, 9 aa, synthetic construct
QQYYGYPRT

SEQ ID NO: 3407-3419 - skipped (13 entries)

SEQ ID NO: 3420 - protein, 449 aa, synthetic construct
ITCPPPMSVEHADIWVKSYSLYSRERYICNSGFKRKAGTSSLTECVLNKATNVAHWTTPSLKCIRDPALVHQRPAPPSGGSGGGGSGGGSGGGGSGGGNWVNVISDLKKIEDLIQSMHIDATLYTESDVHPSCKVTAMKCFLLELQVISLESGDASIHDTVENLIILANNSLSSNGNVTESGCKECEELEEKNIKEFLQSFVHIVQMFINTSGGGGSGGGGSDKTHTCPPCPAPELLGGPSVFLFPPKPKDTLMISRTPEVTCVVVDVSHEDPEVKFNWYVDGVEVHNAKTKPREEQYASTYRVVSVLTVLHQDWLNGKEYKCKVSNKALPAPIEKTISKAKGQPREPQVYTLPPCREEMTKNQVSLWCLVKGFYPSDIAVEWESNGQPENNYKTTPPVLDSDGSFFLYSKLTVDKSRWQQGNVFSCSVMHEALHNHYTQKSLSLSPGK

SEQ ID NO: 3421 - protein, 5 aa, synthetic construct
LTYIH

SEQ ID NO: 3422-3427 - skipped (6 entries)

SEQ ID NO: 3428 - protein, 214 aa, synthetic construct
DIQMTQSPSFLSASVGDRVTITCKASQNVADRVVWHQQKPGKAPKALIYAASYLQSGVPSRFSGSGSGTEFTLTISSLQPEDFATYFCQQFKSYPLTFGQGTKLEIKRTVAAPSVFIFPPSDEQLKSGTASVVCLLNNFYPREAKVQWKVDNALQSGNSQESVTEQDSKDSTYSLSSTLTLSKADYEKHKVYACEVTHQGLSSPVTKSFNRGEC

SEQ ID NO: 3429-3436 - skipped (8 entries)

SEQ ID NO: 3437 - protein, 214 aa, synthetic construct
DIQMTQSPSFLSASVGDRVTITCKASQNVADRVVWHQQKPGKAPKALIFAASYLQSGVPSRFSGSGSGTEFTLTISSLQPEDFATYFCQQFKSYPLTFGQGTKLEIKRTVAAPSVFIFPPSDEQLKSGTASVVCLLNNFYPREAKVQWKVDNALQSGNSQESVTEQDSKDSTYSLSSTLTLSKADYEKHKVYACEVTHQGLSSPVTKSFNRGEC

SEQ ID NO: 3438 - protein, 117 aa, synthetic construct
EVQLVESGGGLVQPGGSLRLSCAASGFTFSNFGMHWVRQAPGKGLEWVSYISSGSSTIYYADTLKGRFTISRDNAKNSLYLQMNSLRAEDTAVYYCARRGEGAMDYWGQGTTVTVSS

SEQ ID NO: 3439-3442 - skipped (4 entries)

SEQ ID NO: 3443 - protein, 7 aa, synthetic construct
AASYLQS

SEQ ID NO: 3444 - skipped

SEQ ID NO: 3445 - protein, 118 aa, synthetic construct
QVQLVQSGAEVKKPGASVKVSCKASGYTFTDYNIHWVRQAPGQGLEWMGYINPYNGRTGYNQKFKARVTMTVDKSTSTAYMELSSLRSEDTAVYYCARWDGSSYFDYWGQGTLVTVSS

SEQ ID NO: 3446 - protein, 106 aa, synthetic construct
EIVLTQSPATLSVSPGERATLSCSASSSVSYMHWYQQKPGQAPRPLIYEISKLASGIPARFSGSGSGTEYTLTISSLQSEDFAVYYCQQWNYPLLTFGQGTKLEIK

SEQ ID NO: 3447 - protein, 227 aa, synthetic construct
DKTHTCPPCPAPELLGGPSVFLFPPKPKDTLMISRTPEVTCVVVDVSHEDPEVKFNWYVDGVEVHNAKTKPREEQYASTYRVVSVLTVLHQDWLNGKEYKCKVSNKALPAPIEKTISKAKGQPREPQVCTLPPSREEMTKNQVSLSCAVKGFYPSDIAVEWESNGQPENNYKTTPPVLDSDGSFFLVSKLTVDKSRWQQGNVFSCSVMHEALHNHYTQKSLSLSPGK

SEQ ID NO: 3448 - protein, 119 aa, synthetic construct
QVQLVQSGAEVKKPGASVKVSCKASGFNIKSAYMHWVRQAPGQEPGCMGRIDPATGKTKYAPKFQARVTMTADTSINTAYTELSSLRSEDTATYYCARSLNWDYGLDYWGQGTLVTVSS

SEQ ID NO: 3449 - protein, 111 aa, synthetic construct
EIVLTQSPATLSLSPGERATLSCRASKSVSILGTHLIHWYQQKPGLAPRLLIYAASNLESGIPDRFSGSGSETDFTLTISRLEPEDFAVYFCQQSIEDPWTFGGGTKVEIK

SEQ ID NO: 3450 - protein, 119 aa, synthetic construct
QVQLVQSGAEVKKPGASVKVSCKASGFNIKSAYMHWVRQAPGQGLEWMGRIDPATGKTKYAPKFQARVTMTADTSTNTAYMELSSLRSEDTAVYYCARSLNWDYGLDYWGQGTLVTVSS

SEQ ID NO: 3451 - protein, 328 aa, synthetic construct
ASTKGPSVFPLAPSSKSTSGGTAALGCLVKDYFPEPVTVSWNSGALTSGVHTFPAVLQSSGLYSLSSVVTVPSSSLGTQTYICNVNHKPSNTKVDKRVEPKSCDKTHTCPPCPAPELLGGPSVFLFPPKPKDTLMISRTPEVTCVVVDVSHEDPEVKFNWYVDGVEVHNAKTKPREEQYASTYRVVSVLTVLHQDWLNGKEYKCKVSNKALPAPIEKTISKAKGQPREPQVCTLPPSREEMTKNQVSLSCAVKGFYPSDIAVEWESNGQPENNYKTTPPVLDSDGSFFLVSKLTVDKSRWQQGNVFSCSVMHEALHNHYTQKSLSLSP

SEQ ID NO: 3452 - protein, 328 aa, synthetic construct; identical to SEQ ID NO: 3451

SEQ ID NO: 3453 - skipped

SEQ ID NO: 3454 - protein, 225 aa, synthetic construct; identical to SEQ ID NO: 508

SEQ ID NO: 3455 - protein, 120 aa, synthetic construct
NVQLQESGPGLVKPSQSLSLTCSVAGYSITSGYFWNWIRQFPGNKLEWMGYISYDGSNNYNPSLKNRISITRDTSKNQFFLKLNSVTTEDTATYYCASPSPGTGYAVDYWGQGTSVTVSS

SEQ ID NO: 3456 - protein, 112 aa, synthetic construct
NVVMTQTPLSLPVSLGDQASISCRSSQSLVHSNGNTYLHWYLQKPGQSPKFLIYKVSNRFSGVPDRFSGGGSGTEFTLKISRVEAEDLGVYFCSQSTHVPFTFGSGTKLEIK

SEQ ID NO: 3457 - protein, 121 aa, synthetic construct
QVQLQQPGAELVRPGASVKLSCKASGYTFTNYWMNWVKQRPGQGLEWIGMIHPSDSATRLNQKFKDKATLTVDKSSSTAYMQLSSPTSEDSAVYYCARWAYYGNLYAIDYWGQGTSVTVSS

SEQ ID NO: 3458 - protein, 111 aa, synthetic construct
DIVLTQSPASLAVSLGQRATISCKASQSVDYDGYSYMHWFQQKPGQPPKLLIYAASNLESGIPARFIGSGSGTDFTLNIHPVEEEDAATYYCQQSNEDPWTFGGGTKLEIK

SEQ ID NO: 3459 - protein, 330 aa, synthetic construct
AKTTAPSVYPLAPVCGDTTGSSVTLGCLVKGYFPEPVTLTWNSGSLSSGVHTFPAVLQSDLYTLSSSVTVTSSTWPSQSITCNVAHPASSTKVDKKIEPRGPTIKPCPPCKCPAPNAAGGPSVFIFPPKIKDVLMISLSPIVTCVVVDVSEDDPDVQISWFVNNVEVHTAQTQTHREDYNSTLRVVSALPIQHQDWMSGKEFKCKVNNKDLGAPIERTISKPKGSVRAPQVCVLPPPEEEMTKKQVTLSCAVTDFMPEDIYVEWTNNGKTELNYKNTEPVLDSDGSYFMVSKLRVEKKNWVERNSYSCSVVHEGLHNHHTTKSFSRTPGK

SEQ ID NO: 3460 - protein, 228 aa, synthetic construct
TIKPCPPCKCPAPNAAGGPSVFIFPPKIKDVLMISLSPIVTCVVVDVSEDDPDVQISWFVNNVEVHTAQTQTHREDYNSTLRVVSALPIQHQDWMSGKEFKCKVNNKDLGAPIERTISKPKGSVRAPQVCVLPPPEEEMTKKQVTLSCAVTDFMPEDIYVEWTNNGKTELNYKNTEPVLDSDGSYFMVSKLRVEKKNWVERNSYSCSVVHEGLHNHHTTKSFSRTPGK

SEQ ID NO: 3461 - protein, 107 aa, synthetic construct
RADAAPTVSIFPPSSEQLTSGGASVVCFLNNFYPKDINVKWKIDGSERQNGVLNSWTDQDSKDSTYSMSSTLTLTKDEYERHNSYTCEATHKTSTSPIVKSFNRNEC

SEQ ID NO: 3462 - protein, 228 aa, synthetic construct
TIKPCPPCKCPAPNAAGGPSVFIFPPKIKDVLMISLSPIVTCVVVDVSEDDPDVQISWFVNNVEVHTAQTQTHREDYNSTLRVVSALPIQHQDWMSGKEFKCKVNNKDLGAPIERTISKPKGSVRAPQVYVLPPCEEEMTKKQVTLWCMVTDFMPEDIYVEWTNNGKTELNYKNTEPVLDSDGSYFMYSKLRVEKKNWVERNSYSCSVVHEGLHNHHTTKSFSRTPGK

SEQ ID NO: 3463 - protein, 121 aa, synthetic construct
EVQLVESGGGLVQPGASLKLSCVASGFTFSDYWMSWVRQTPGKTMEWIGNIKYDGSHTNYAPSLKNRFTISRDNAKSTLFLQMSNVRSEDTATYYCTRESHYGYIYPFDYWGQGVMVTVSS

SEQ ID NO: 3464 - protein, 107 aa, synthetic construct
DIQMTQSPSSMSVSLGDTVTITCRASQDVGIYVNWFQQKPGKSPRRMIYRATNLADGVPSRFSGSRSGSDYSLTISSLESEDVADYHCLQYDESPFTFGSGTKLEIK

SEQ ID NO: 3465 - protein, 119 aa, synthetic construct
QVQLQQSGTELMKPGASVKISCKASGYTFSNYWIEWIKQRPGHGLEWVGEILPGAGPTNYNEKFKGKATFTADSSSNTAYMQLSSLTSEDSAVYYCARTDYDYDWFAYWGQGTLVTVSA

SEQ ID NO: 3466 - protein, 113 aa, synthetic construct
DIVMSQSPSSLAVSVGEKVTMSCKSSQSLLYSGNQKNYLAWYQQKPGQSPKLLIYWASTRESGVPDRFTGSGSGTDFTLTINSVKAEDLTVYYCQQYYGYPRTFGGGTKVEIK

SEQ ID NO: 3467 - protein, 333 aa, synthetic construct
AKTTAPSVYPLAPVSGDTTGSSVTLGCLVKGYFPEPVTLTWNSGSLSSGVHTFPAVLQSDLYTLSSSVTVTSSTWPSQSITCNVAHPASSTKVDKKIEPKSCDKTHTCPPCPAPNAAGGPSVFIFPPKIKDVLMISLSPIVTCVVVDVSEDDPDVQISWFVNNVEVHTAQTQTHREDYNSTLRVVSALPIQHQDWMSGKEFKCKVNNKDLGAPIERTISKPKGSVRAPQVCVLPPPEEEMTKKQVTLSCAVTDFMPEDIYVEWTNNGKTELNYKNTEPVLDSDGSYFMVSKLRVEKKNWVERNSYSCSVVHEGLHNHHTTKSFSRTPGKEPEA

SEQ ID NO: 3468 - protein, 231 aa, synthetic construct
DKTHTCPPCPAPNAAGGPSVFIFPPKIKDVLMISLSPIVTCVVVDVSEDDPDVQISWFVNNVEVHTAQTQTHREDYNSTLRVVSALPIQHQDWMSGKEFKCKVNNKDLGAPIERTISKPKGSVRAPQVCVLPPPEEEMTKKQVTLSCAVTDFMPEDIYVEWTNNGKTELNYKNTEPVLDSDGSYFMVSKLRVEKKNWVERNSYSCSVVHEGLHNHHTTKSFSRTPGKEPEA

SEQ ID NO: 3469 - protein, 240 aa, synthetic construct
DKTHTCPPCPAPNAAGGPSVFIFPPKIKDVLMISLSPIVTCVVVDVSEDDPDVQISWFVNNVEVHTAQTQTHREDYNSTLRVVSALPIQHQDWMSGKEFKCKVNNKDLGAPIERTISKPKGSVRAPQVYVLPPCEEEMTKKQVTLWCMVTDFMPEDIYVEWTNNGKTELNYKNTEPVLDSDGSYFMYSKLRVEKKNWVERNSYSCSVVHEGLHNHHTTKSFSRTPGKGGGGSHHHHHHHH

SEQ ID NO: 3470-3471 - skipped (2 entries)

SEQ ID NO: 3472 - protein, 78 aa, synthetic construct
ITCPPPMSVEHADIWVKSYSLYSRERYICNSGFKRKAGTSSLTECVLNKATNVAHWTTPSLKCIRDPALVHQRPAPPS

SEQ ID NO: 3473 - protein, 20 aa, synthetic construct
GGSGGGGSGGGSGGGGSGGG

SEQ ID NO: 3474 - protein, 212 aa, synthetic construct
ITCPPPMSVEHADIWVKSYSLYSRERYICNSGFKRKAGTSSLTECVLNKATNVAHWTTPSLKCIRDPALVHQRPAPPSGGSGGGGSGGGSGGGGSGGGNWVNVISDLKKIEDLIQSMHIDATLYTESDVHPSCKVTAMKCFLLELQVISLESGDASIHDTVENLIILANNSLSSNGNVTESGCKECEELEEKNIKEFLQSFVHIVQMFINTS

SEQ ID NO: 3475 - protein, 107 aa, synthetic construct
DIQMTQSPSFLSASVGDRVTITCKASQNVADRVVWHQQKPGKAPKALIYAASYLQSGVPSRFSGSGSGTEFTLTISSLQPEDFATYFCQQFKSYPLTFGQGTKLEIK

SEQ ID NO: 3476 - protein, 107 aa, synthetic construct
DIQMTQSPSFLSASVGDRVTITCKASQNVADRVVWHQQKPGKAPKALIFAASYLQSGVPSRFSGSGSGTEFTLTISSLQPEDFATYFCQQFKSYPLTFGQGTKLEIK

SEQ ID NO: 3477 - protein, 227 aa, synthetic construct; identical to SEQ ID NO: 3447

SEQ ID NO: 3478-3641 - skipped (164 entries)

SEQ ID NO: 3642 - protein, 243 aa, synthetic construct
EVQLVESGGGLVQPGGSLRLSCAASGFTFSNFGMHWVRQAPGKGLEWVSYISSGSSTIYYADTLKGRFTISRDNSKNTLYLQMNSLRAEDTAVYYCARRGEGAMDYWGQGTTVTVSSGGGGSGGGGSGGGGSGGGGSDNQLTQSPSFLSASVGDRVTITCRASSSVNYIYWYQQKPGKAPKLLIYYTSNLAPGVPSRFSGSGSGNEYTLTISSLQPEDFATYYCQQFTSSPFTFGQGTKLEIK

SEQ ID NO: 3643 - skipped

SEQ ID NO: 3644 - protein, 107 aa, synthetic construct [sequence omitted]

SEQ ID NO: 3645 - protein, 330 aa, synthetic construct
ASTKGPSVFPLAPSSKSTSGGTAALGCLVKDYFPEPVTVSWNSGALTSGVHTFPAVLQSSGLYSLSSVVTVPSSSLGTQTYICNVNHKPSNTKVDKKVEPKSCDKTHTCPPCPAPELLGGPSVFLFPPKPKDTLMISRTPEVTCVVVDVSHEDPEVKFNWYVDGVEVHNAKTKPREEQYASTYRVVSVLTVLHQDWLNGKEYKCKVSNKALPAPIEKTISKAKGQPREPQVYTLPPSREEMTKNQVSLTCLVKGFYPSDIAVEWESNGQPENNYKTTPPVLDSDGSFFLYSKLTVDKSRWQQGNVFSCSVMHEALHNHYTQKSLSLSPGK

SEQ ID NO: 3646 - protein, 334 aa, synthetic construct
ASTKGPSVFPLAPSSKSTSGGTAALGCLVKDYFPEPVTVSWNSGALTSGVHTFPAVLQSSGLYSLSSVVTVPSSSLGTQTYICNVNHKPSNTKVDKKVEPKSCDKTHTCPPCPAPELLGGPSVFLFPPKPKDTLMISRTPEVTCVVVDVSHEDPEVKFNWYVDGVEVHNAKTKPREEQYASTYRVVSVLTVLHQDWLNGKEYKCKVSNKALPAPIEKTISKAKGQPREPQVYTLPPSREEMTKNQVSLTCLVKGFYPSDIAVEWESNGQPENNYKTTPPVLDSDGSFFLYSKLTVDKSRWQQGNVFSCSVMHEALHNHYTQKSLSLSPGKEPEA

SEQ ID NO: 3647 - protein, 330 aa, synthetic construct; identical to SEQ ID NO: 41

SEQ ID NO: 3648 - protein, 227 aa, synthetic construct
DKTHTCPPCPAPELLGGPSVFLFPPKPKDTLMISRTPEVTCVVVDVSHEDPEVKFNWYVDGVEVHNAKTKPREEQYASTYRVVSVLTVLHQDWLNGKEYKCKVSNKALPAPIEKTISKAKGQPREPQVYTLPPCREEMTKNQVSLWCLVKGFYPSDIAVEWESNGQPENNYKTTPPVLDSDGSFFLYSKLTVDKSRWQQGNVFSCSVMHEALHNHYTQKSLSLSPGK

SEQ ID NO: 3649 - protein, 330 aa, synthetic construct
ASTKGPSVFPLAPSSKSTSGGTAALGCLVKDYFPEPVTVSWNSGALTSGVHTFPAVLQSSGLYSLSSVVTVPSSSLGTQTYICNVNHKPSNTKVDKRVEPKSCDKTHTCPPCPAPELLGGPSVFLFPPKPKDTLMISRTPEVTCVVVDVSHEDPEVKFNWYVDGVEVHNAKTKPREEQYASTYRVVSVLTVLHQDWLNGKEYKCKVSNKALPAPIEKTISKAKGQPREPQVCTLPPSREEMTKNQVSLSCAVKGFYPSDIAVEWESNGQPENNYKTTPPVLDSDGSFFLVSKLTVDKSRWQQGNVFSCSVMHEALHNHYTQKSLSLSPGK

SEQ ID NO: 3650 - protein, 10 aa, synthetic construct
GHDFRLTYIH

SEQ ID NO: 3651 - protein, 17 aa, synthetic construct
RVSAGSGNVKYNEKFKG

SEQ ID NO: 3652 - protein, 11 aa, synthetic construct
KASQNVGNRVV

SEQ ID NO: 3653 - protein, 7 aa, synthetic construct
SSSHRYK

SEQ ID NO: 3654 - protein, 17 aa, synthetic construct
RIYAGSGNVKYNEKFKG

SEQ ID NO: 3655 - protein, 11 aa, synthetic construct
KASQNVADRVV

SEQ ID NO: 3656 - protein, 10 aa, synthetic construct
GHDFKLTYIH

SEQ ID NO: 3657 - protein, 17 aa, synthetic construct
RVSAGSGNTKYNEKFKG

SEQ ID NO: 3658 - protein, 11 aa, synthetic construct
KASQNVGDRVA

SEQ ID NO: 3659 - protein, 17 aa, synthetic construct
RVYAGSGNTKYNEKFKG

SEQ ID NO: 3660 - protein, 11 aa, synthetic construct
KASQNVEDRVV

SEQ ID NO: 3661 - protein, 17 aa, synthetic construct
RISAGSGNTKYNEKFKG

SEQ ID NO: 3662 - protein, 11 aa, synthetic construct
KASQNVGDRVV

SEQ ID NO: 3663 - protein, 17 aa, synthetic construct
RIYAGSGNTKYNEKFKG

SEQ ID NO: 3664 - protein, 9 aa, synthetic construct
LQHNSYPLT

SEQ ID NO: 3665 - protein, 17 aa, synthetic construct
RVSAGSGNVNYAQKFQG

SEQ ID NO: 3666 - protein, 11 aa, synthetic construct
RASQNVDNRLG

SEQ ID NO: 3667 - protein, 11 aa, synthetic construct
KASQNVDNRVA

SEQ ID NO: 3668 - protein, 7 aa, synthetic construct
AASSLQK

SEQ ID NO: 3669 - protein, 449 aa, synthetic construct
ITCPPPMSVEHADIWVKSYSLYSRERYICNSGFKRKAGTSSLTECVLNKATNVAHWTTPSLKCIRDPALVHQRPAPPSGGSGGGGSGGGSGGGGSGGGNWVNVISDLKKIEDLIQSMHIDATLYTESDVHPSCKVTAMKCFLLELQVISLESGDASIHDTVENLIILANNSLSSNGNVTESGCKECEELEEKNIKEFLQSFVHIVAMFINTSGGGGSGGGGSDKTHTCPPCPAPELLGGPSVFLFPPKPKDTLMISRTPEVTCVVVDVSHEDPEVKFNWYVDGVEVHNAKTKPREEQYASTYRVVSVLTVLHQDWLNGKEYKCKVSNKALPAPIEKTISKAKGQPREPQVYTLPPCREEMTKNQVSLWCLVKGFYPSDIAVEWESNGQPENNYKTTPPVLDSDGSFFLYSKLTVDKSRWQQGNVFSCSVMHEALHNHYTQKSLSLSPGK

SEQ ID NO: 3670 - protein, 114 aa, synthetic construct
NWVNVISDLKKIEDLIQSMHIDATLYTESDVHPSCKVTAMKCFLLELQVISLESGDASIHDTVENLIILANNSLSSNGNVTESGCKECEELEEKNIKEFLQSFVHIVAMFINTS

SEQ ID NO: 3671 - protein, 212 aa, synthetic construct
ITCPPPMSVEHADIWVKSYSLYSRERYICNSGFKRKAGTSSLTECVLNKATNVAHWTTPSLKCIRDPALVHQRPAPPSGGSGGGGSGGGSGGGGSGGGNWVNVISDLKKIEDLIQSMHIDATLYTESDVHPSCKVTAMKCFLLELQVISLESGDASIHDTVENLIILANNSLSSNGNVTESGCKECEELEEKNIKEFLQSFVHIVAMFINTS

SEQ ID NO: 3672 - protein, 449 aa, synthetic construct
ITCPPPMSVEHADIWVKSYSLYSRERYICNSGFKRKAGTSSLTECVLNKATNVAHWTTPSLKCIRDPALVHQRPAPPSGGSGGGGSGGGSGGGGSGGGNWVNVISDLKKIEDLIQSMHIDATLYTESDVHPSCKVTAMKCFLLELQVISLESGDASIHDTVEQLIILANNSLSSNGNVTESGCKECEELEEKNIKEFLQSFVHIVQMFINTSGGGGSGGGGSDKTHTCPPCPAPELLGGPSVFLFPPKPKDTLMISRTPEVTCVVVDVSHEDPEVKFNWYVDGVEVHNAKTKPREEQYASTYRVVSVLTVLHQDWLNGKEYKCKVSNKALPAPIEKTISKAKGQPREPQVYTLPPCREEMTKNQVSLWCLVKGFYPSDIAVEWESNGQPENNYKTTPPVLDSDGSFFLYSKLTVDKSRWQQGNVFSCSVMHEALHNHYTQKSLSLSPGK

SEQ ID NO: 3673 - protein, 114 aa, synthetic construct
NWVNVISDLKKIEDLIQSMHIDATLYTESDVHPSCKVTAMKCFLLELQVISLESGDASIHDTVEQLIILANNSLSSNGNVTESGCKECEELEEKNIKEFLQSFVHIVQMFINTS

SEQ ID NO: 3674 - protein, 20 aa, synthetic construct
GGSGGGGSGGGSGGGGSGGG

SEQ ID NO: 3675-3701 - skipped (27 entries)

SEQ ID NO: 3702 - protein, 7 aa, synthetic construct
FRLTYIH

SEQ ID NO: 3703-4662 - skipped (960 entries)

SEQ ID NO: 4663 - protein, 449 aa, Homo sapiens
QVQLVQSGGGVVQPGRSLRLSCAASGFTFSRYTIHWVRQAPGKGLEWVAVMSYNGNNKHYADSVNGRFTISRNDSKNTLYLNMNSLRPEDTAVYYCARIRDTAMFFAHWGQGTLVTVSSASTKGPSVFPLAPSSKSTSGGTAALGCLVKDYFPEPVTVSWNSGALTSGVHTFPAVLQSSGLYSLSSVVTVPSSSLGTQTYICNVNHKPSNTKVDKKVEPKSCDKTHTCPPCPAPELLGGPSVFLFPPKPKDTLMISRTPEVTCVVVDVSHEDPEVKFNWYVDGVEVHNAKTKPREEQYNSTYRVVSVLTVLHQDWLNGKEYKCKVSNKALPAPIEKTISKAKGQPREPQVYTLPPSRDELTKNQVSLTCLVKGFYPSDIAVEWESNGQPENNYKTTPPVLDSDGSFFLYSKLTVDKSRWQQGNVFSCSVMHEALHNHYTQKSLSLSPGK

SEQ ID NO: 4664 - protein, 395 aa, Homo sapiens
ASTKGPSVFPLAPCSRSTSESTAALGCLVKDYFPEPVTVSWNSGALTSGVHTFPAVLQSSGLYSLSSVVTVPSSNFGTQTYTCNVDHKPSNTKVDKTVERKCCVECPPCPAPPVAGPSVFLFPPKPKDTLMISRTPEVTCVVVDVSHEDPEVQFNWYVDGVEVHNAKTKPREEQFNSTFRVVSVLTVVHQDWLNGKEYKCKVSNKGLPAPIEKTISKTKGQPREPQVYTLPPSREEMTKNQVSLTCLVKGFYPSDISVEWESNGQPENNYKTTPPMLDSDGSFFLYSKLTVDKSRWQQGNVFSCSVMHEALHNHYTQKSLSLSPELQLEESCAEAQDGELDGLWTTITIFITLFLLSVCYSATITFFKVKWIFSSVVDLKQTIVPDYRNMIRQGA

SEQ ID NO: 4665 - protein, 446 aa, Homo sapiens
ASTKGPSVFPLAPCSRSTSGGTAALGCLVKDYFPEPVTVSWNSGALTSGVHTFPAVLQSSGLYSLSSVVTVPSSSLGTQTYTCNVNHKPSNTKVDKRVELKTPLGDTTHTCPRCPEPKSCDTPPPCPRCPEPKSCDTPPPCPRCPEPKSCDTPPPCPRCPAPELLGGPSVFLFPPKPKDTLMISRTPEVTCVVVDVSHEDPEVQFKWYVDGVEVHNAKTKPREEQYNSTFRVVSVLTVLHQDWLNGKEYKCKVSNKALPAPIEKTISKTKGQPREPQVYTLPPSREEMTKNQVSLTCLVKGFYPSDIAVEWESSGQPENNYNTTPPMLDSDGSFFLYSKLTVDKSRWQQGNIFSCSVMHEALHNRFTQKSLSLSPELQLEESCAEAQDGELDGLWTTITIFITLFLLSVCYSATVTFFKVKWIFSSVVDLKQTIIPDYRNMIGQGA

SEQ ID NO: 4666 - protein, 396 aa, Homo sapiens
ASTKGPSVFPLAPCSRSTSESTAALGCLVKDYFPEPVTVSWNSGALTSGVHTFPAVLQSSGLYSLSSVVTVPSSSLGTKTYTCNVDHKPSNTKVDKRVESKYGPPCPSCPAPEFLGGPSVFLFPPKPKDTLMISRTPEVTCVVVDVSQEDPEVQFNWYVDGVEVHNAKTKPREEQFNSTYRVVSVLTVLHQDWLNGKEYKCKVSNKGLPSSIEKTISKAKGQPREPQVYTLPPSQEEMTKNQVSLTCLVKGFYPSDIAVEWESNGQPENNYKTTPPVLDSDGSFFLYSRLTVDKSRWQEGNVFSCSVMHEALHNHYTQKSLSLSLELQLEESCAEAQDGELDGLWTTITIFITLFLLSVCYSATVTFFKVKWIFSSVVDLKQTIVPDYRNMIRQGA

SEQ ID NO: 4667 - protein, 398 aa, Homo sapiens
ASPTSPKVFPLSLCSTQPDGNVVIACLVQGFFPQEPLSVTWSESGQGVTARNFPPSQDASGDLYTTSSQLTLPATQCLAGKSVTCHVKHYTNPSQDVTVPCPVPSTPPTPSPSTPPTPSPSCCHPRLSLHRPALEDLLLGSEANLTCTLTGLRDASGVTFTWTPSSGKSAVQGPPERDLCGCYSVSSVLPGCAEPWNHGKTFTCTAAYPESKTPLTATLSKSGNTFRPEVHLLPPPSEELALNELVTLTCLARGFSPKDVLVRWLQGSQELPREKYLTWASRQEPSQGTTTFAVTSILRVAAEDWKKGDTFSCMVGHEALPLAFTQKTIDRLADWQMPPPYVVLDLPQETLEEETPGANLWPTTITFLTLFLLSLFYSTALTVTSVRGPSGNREGPQY

SEQ ID NO: 4668 - protein, 391 aa, Homo sapiens
ASPTSPKVFPLSLDSTPQDGNVVVACLVQGFFPQEPLSVTWSESGQNVTARNFPPSQDASGDLYTTSSQLTLPATQCPDGKSVTCHVKHYTNSSQDVTVPCRVPPPPPCCHPRLSLHRPALEDLLLGSEANLTCTLTGLRDASGATFTWTPSSGKSAVQGPPERDLCGCYSVSSVLPGCAQPWNHGETFTCTAAHPELKTPLTANITKSGNTFRPEVHLLPPPSEELALNELVTLTCLARGFSPKDVLVRWLQGSQELPREKYLTWASRQEPSQGTTTYAVTSILRVAAEDWKKGETFSCMVGHEALPLAFTQKTIDRMAGSCCVADWQMPPPYVVLDLPQETLEEETPGANLWPTTITFLTLFLLSLFYSTALTVTSVRGPSGKREGPQY

SEQ ID NO: 4669 - protein, 570 aa, Homo sapiens
GSASAPTLFPLVSCENSPSDTSSVAVGCLAQDFLPDSITFSWKYKNNSDISSTRGFPSVLRGGKYAATSQVLLPSKDVMQGTDEHVVCKVQHPNGNKEKNVPLPVIAELPPKVSVFVPPRDGFFGNPRKSKLICQATGFSPRQIQVSWLREGKQVGSGVTTDQVQAEAKESGPTTYKVTSTLTIKESDWLGQSMFTCRVDHRGLTFQQNASSMCVPDQDTAIRVFAIPPSFASIFLTKSTKLTCLVTDLTTYDSVTISWTRQNGEAVKTHTNISESHPNATFSAVGEASICEDDWNSGERFTCTVTHTDLPSPLKQTISRPKGVALHRPDVYLLPPAREQLNLRESATITCLVTGFSPADVFVQWMQRGQPLSPEKYVTSAPMPEPQAPGRYFAHSILTVSEEEWNTGETYTCVVAHEALPNRVTERTVDKSTEGEVSADEEGFENLWATASTFIVLFLLSLFYSTTVTLFKVKPADVFVQWMQRGEPLSPEKYVTSAPMPEPQAPGRYFAHSILTVSEEEWNTGQTYTCVVAHEALPNRVTERTVDKSTGKPTLYNVSLVMSDTAGTCY

SEQ ID NO: 4670 - protein, 546 aa, Homo sapiens
ASTQSPSVFPLTRCCKNIPSNATSVTLGCLATGYFPEPVMVTWDTGSLNGTTMTLPATTLTLSGHYATISLLTVSGAWAKQMFTCRVAHTPSSTDWVDNKTFSVCSRDFTPPTVKILQSSCDGGGHFPPTIQLLCLVSGYTPGTINITWLEDGQVMDVDLSTASTTQEGELASTQSELTLSQKHWLSDRTYTCQVTYQGHTFEDSTKKCADSNPRGVSAYLSRPSPFDLFIRKSPTITCLVVDLAPSKGTVNLTWSRASGKPVNHSTRKEEKQRNGTLTVTSTLPVGTRDWIEGETYQCRVTHPHLPRALMRSTTKTSGPRAAPEVYAFATPEWPGSRDKRTLACLIQNFMPEDISVQWLHNEVQLPDARHSTTQPRKTKGSGFFVFSRLEVTRAEWEQKDEFICRAVHEAASPSQTVQRAVSVNPGLAGGSAQSQRAPDRVLCHSGQQQGLPRAAGGSVPHPRCHCGAGRADWPGPPELDVCVEEAEGEAPWTWTGLCIFAALFLLSVSYSAAITLLMVQRFLSATRQGRPQTSLDYTNVLQPHA

SEQ ID NO: 4671 - protein, 452 aa, synthetic construct
EVRLQQSGPDLIKPGASVKMSCKASGYTFTGYVMHWVKQRPGQGLEWIGFINPYNDDIQSNERFRGKATLTSDKSSTTAYMELSSLTSEDSAVYYCARGAGYNFDGAYRFFDFWGQGTTLTVSSASTKGPSVFPLAPSSKSTSGGTAALGCLVKDYFPEPVTVSWNSGALTSGVHTFPAVLQSSGLYSLSSVVTVPSSSLGTQTYICNVNHKPSNTKVDKRVEPKSCDKTHTCPPCPAPELLGGPSVFLFPPKPKDTLMISRTPEVTCVVVDVSHEDPEVKFNWYVDGVEVHNAKTKPREEQYASTYRVVSVLTVLHQDWLNGKEYKCKVSNKALPAPIEKTISKAKGQPREPQVYTLPPCREEMTKNQVSLWCLVKGFYPSDIAVEWESNGQPENNYKTTPPVLDSDGSFFLYSKLTVDKSRWQQGNVFSCSVMHEALHNHYTQKSLSLSP

SEQ ID NO: 4672 - protein, 452 aa, synthetic construct
EVRLQQSGPDLIKPGASVKMSCKASGYTFTGYVMHWVKQRPGQGLEWIGFINPYNDDIQSNERFRGKATLTSDKSSTTAYMELSSLTSEDSAVYYCARGAGYNFDGAYRFFDFWGQGTTLTVSSASTKGPSVFPLAPSSKSTSGGTAALGCLVKDYFPEPVTVSWNSGALTSGVHTFPAVLQSSGLYSLSSVVTVPSSSLGTQTYICNVNHKPSNTKVDKRVEPKSCDKTHTCPPCPAPELLGGPSVFLFPPKPKDTLMISRTPEVTCVVVDVSHEDPEVKFNWYVDGVEVHNAKTKPREEQYNSTYRVVSVLTVLHQDWLNGKEYKCKVSNKALPAPIEKTISKAKGQPREPQVYTLPPCREEMTKNQVSLWCLVKGFYPSDIAVEWESNGQPENNYKTTPPVLDSDGSFFLYSKLTVDKSRWQQGNVFSCSVMHEALHNHYTQKSLSLSP

SEQ ID NO: 4673 - protein, 472 aa, synthetic construct
METDTLLLWVLLLWVPGSTGQVQLVQSGAEVKKPGSSVKVSCKASGYTFTGYVMHWVRQAPGQGLEWMGFINPYNDDIQSNERFRGRVTITSDKSTTTAYMELSSLRSEDTAVYYCARGAGYNFDGAYRFFDFWGQGTLVTVSSASTKGPSVFPLAPSSKSTSGGTAALGCLVKDYFPEPVTVSWNSGALTSGVHTFPAVLQSSGLYSLSSVVTVPSSSLGTQTYICNVNHKPSNTKVDKRVEPKSCDKTHTCPPCPAPELLGGPSVFLFPPKPKDTLMISRTPEVTCVVVDVSHEDPEVKFNWYVDGVEVHNAKTKPREEQYNSTYRVVSVLTVLHQDWLNGKEYKCKVSNKALPAPIEKTISKAKGQPREPQVCTLPPSREEMTKNQVSLSCAVKGFYPSDIAVEWESNGQPENNYKTTPPVLDSDGSFFLVSKLTVDKSRWQQGNVFSCSVMHEALHNHYTQKSLSLSP

SEQ ID NO: 4674 - protein, 472 aa, synthetic construct
METDTLLLWVLLLWVPGSTGQVQLVQSGAEVKKPGSSVKVSCKASGYTFTGYVMHWVRQAPGQGLEWMGFINPYNDDIQSNERFRGRVTITSDKSTTTAYMELSSLRSEDTAVYYCARGAGYNFDGAYRFFDFWGQGTLVTVSSASTKGPSVFPLAPSSKSTSGGTAALGCLVKDYFPEPVTVSWNSGALTSGVHTFPAVLQSSGLYSLSSVVTVPSSSLGTQTYICNVNHKPSNTKVDKRVEPKSCDKTHTCPPCPAPELLGGPSVFLFPPKPKDTLMISRTPEVTCVVVDVSHEDPEVKFNWYVDGVEVHNAKTKPREEQYNSTYRVVSVLTVLHQDWLNGKEYKCKVSNKALPAPIEKTISKAKGQPREPQVYTLPPSREEMTKNQVSLTCLVKGFYPSDIAVEWESNGQPENNYKTTPPVLDSDGSFFLYSKLTVDKSRWQQGNVFSCSVMHEALHNHYTQKSLSLSP

SEQ ID NO: 4675 - protein, 452 aa, synthetic construct
QVQLVQSGAEVKKPGSSVKVSCKASGYTFTGYVMHWVRQAPGQGLEWMGFINPYNDDIQSNERFRGRVTITSDKSTTTAYMELSSLRSEDTAVYYCARGAGYNFDGAYRFFDFWGQGTLVTVSSASTKGPSVFPLAPSSKSTSGGTAALGCLVKDYFPEPVTVSWNSGALTSGVHTFPAVLQSSGLYSLSSVVTVPSSSLGTQTYICNVNHKPSNTKVDKRVEPKSCDKTHTCPPCPAPELLGGPSVFLFPPKPKDTLMISRTPEVTCVVVDVSHEDPEVKFNWYVDGVEVHNAKTKPREEQYASTYRVVSVLTVLHQDWLNGKEYKCKVSNKALPAPIEKTISKAKGQPREPQVYTLPPCREEMTKNQVSLWCLVKGFYPSDIAVEWESNGQPENNYKTTPPVLDSDGSFFLYSKLTVDKSRWQQGNVFSCSVMHEALHNHYTQKSLSLSP

SEQ ID NO: 4676 - protein, 470 aa, synthetic construct
QIQLQESGPGLVKPSQSLSLSCSVTGFSITTTGYHWNWIRQFPGKKLEWMGYIYSSGSTSYNPSLKSRFSITRDTSKNQFFLQLNSVTTEDTATYYCARGDWHYFDYWGPGTMVTVSSGGGGSGGGGSGGGGSGGGGSSFTLTQPPLVSVAVGQVATITCSGEKLSDKYVHWYQQKPGRAPVMVIYENDRRPSGIPDQFSGSNSGNIASLTISKAQAGDEADYFCQFWDSTNSAVFGGGTQLTVLDKTHTCPPCPAPELLGGPSVFLFPPKPKDTLMISRTPEVTCVVVDVSHEDPEVKFNWYVDGVEVHNAKTKPREEQYASTYRVVSVLTVLHQDWLNGKEYKCKVSNKALPAPIEKTISKAKGQPREPQVCTLPPSREEMTKNQVSLSCAVKGFYPSDIAVEWESNGQPENNYKTTPPVLDSDGSFFLVSKLTVDKSRWQQGNVFSCSVMHEALHNRFTQKSLSLSP

SEQ ID NO: 4677 - protein, 452 aa, synthetic construct
QVQLVQSGAEVKKPGSSVKVSCKASGYTFTGYVMHWVRQAPGQGLEWMGFIIPIFGTANYAQKFQGRVTITSDKSTTTAYMELSSLRSEDTAVYYCARGAGYNFDGAYRFFDFWGQGTLVTVSSASTKGPSVFPLAPSSKSTSGGTAALGCLVKDYFPEPVTVSWNSGALTSGVHTFPAVLQSSGLYSLSSVVTVPSSSLGTQTYICNVNHKPSNTKVDKRVEPKSCDKTHTCPPCPAPELLGGPSVFLFPPKPKDTLMISRTPEVTCVVVDVSHEDPEVKFNWYVDGVEVHNAKTKPREEQYASTYRVVSVLTVLHQDWLNGKEYKCKVSNKALPAPIEKTISKAKGQPREPQVYTLPPCREEMTKNQVSLWCLVKGFYPSDIAVEWESNGQPENNYKTTPPVLDSDGSFFLYSKLTVDKSRWQQGNVFSCSVMHEALHNHYTQKSLSLSP

SEQ ID NO: 4678 - protein, 471 aa, synthetic construct
EIQLLESGGGLVQPGGSLRLSCAVSGFSITTTGYHWNWVRQAPGKGLEWVGYIYSSGSTSYNPSLKSRFTISRDTSKNTFYLQMNSLRAEDTAVYYCARGDWHYFDYWGQGTMVTVSSGGGGSGGGGSGGGGSGGGGSDSVTTQSPLSLPVTLGQPASISCSGEKLSDKYVHWYQQRPGQSPRMLIYENDRRPSGVPDRFSGSNSGNDATLKISRVEAEDVGVYFCQFWDSTNSAVFGGGTKVEIKDKTHTCPPCPAPELLGGPSVFLFPPKPKDTLMISRTPEVTCVVVDVSHEDPEVKFNWYVDGVEVHNAKTKPREEQYASTYRVVSVLTVLHQDWLNGKEYKCKVSNKALPAPIEKTISKAKGQPREPQVCTLPPSREEMTKNQVSLSCAVKGFYPSDIAVEWESNGQPENNYKTTPPVLDSDGSFFLVSKLTVDKSRWQQGNVFSCSVMHEALHNHYTQKSLSLSP

SEQ ID NO: 4679 - protein, 470 aa, synthetic construct
EIQLLESGGGLVQPGGSLRLSCAVSGFSITTTGYHWNWVRQAPGKGLEWVGYIYSSGSTSYNPSLKSRFTISRDTSKNTFYLQMNSLRAEDTAVYYCARGDWHYFDYWGQGTMVTVSSGGGGSGGGGSGGGGSGGGGSSSETTQPPSVSVSPGQTASITCSGEKLSDKYVHWYQQKPGQSPVMVIYENDRRPSGIPERFSGSNSGNTATLTISGTQAMDEADYFCQFWDSTNSAVFGGGTQLTVLDKTHTCPPCPAPELLGGPSVFLFPPKPKDTLMISRTPEVTCVVVDVSHEDPEVKFNWYVDGVEVHNAKTKPREEQYASTYRVVSVLTVLHQDWLNGKEYKCKVSNKALPAPIEKTISKAKGQPREPQVCTLPPSREEMTKNQVSLSCAVKGFYPSDIAVEWESNGQPENNYKTTPPVLDSDGSFFLVSKLTVDKSRWQQGNVFSCSVMHEALHNHYTQKSLSLSP

SEQ ID NO: 4680 - protein, 452 aa, synthetic construct
QVQLVQSGAEVKKPGASVKVSCKASTSGFHGYPMHWVRQAPGQGLEWMGFINPYNDDIQSNERFRGRVTMTSDKSTTTAYMELSSLRSEDTAVYYCARGNGKWGDGAYRFFDFWGQGTLVTVSSASTKGPSVFPLAPSSKSTSGGTAALGCLVKDYFPEPVTVSWNSGALTSGVHTFPAVLQSSGLYSLSSVVTVPSSSLGTQTYICNVNHKPSNTKVDKRVEPKSCDKTHTCPPCPAPELLGGPSVFLFPPKPKDTLMISRTPEVTCVVVDVSHEDPEVKFNWYVDGVEVHNAKTKPREEQYASTYRVVSVLTVLHQDWLNGKEYKCKVSNKALPAPIEKTISKAKGQPREPQVYTLPPCREEMTKNQVSLWCLVKGFYPSDIAVEWESNGQPENNYKTTPPVLDSDGSFFLYSKLTVDKSRWQQGNVFSCSVMHEALHNHYTQKSLSLSP

SEQ ID NO: 4681 - protein, 452 aa, synthetic construct
QVQLVQSGAEVKKPGASVKVSCKASPRGFHGYHMHWVRQAPGQGLEWMGFINPYNDDIQSNERFRGRVTMTSDKSTTTAYMELSSLRSEDTAVYYCARGNGKWGDGAYRFFDFWGQGTLVTVSSASTKGPSVFPLAPSSKSTSGGTAALGCLVKDYFPEPVTVSWNSGALTSGVHTFPAVLQSSGLYSLSSVVTVPSSSLGTQTYICNVNHKPSNTKVDKRVEPKSCDKTHTCPPCPAPELLGGPSVFLFPPKPKDTLMISRTPEVTCVVVDVSHEDPEVKFNWYVDGVEVHNAKTKPREEQYASTYRVVSVLTVLHQDWLNGKEYKCKVSNKALPAPIEKTISKAKGQPREPQVYTLPPCREEMTKNQVSLWCLVKGFYPSDIAVEWESNGQPENNYKTTPPVLDSDGSFFLYSKLTVDKSRWQQGNVFSCSVMHEALHNHYTQKSLSLSP

SEQ ID NO: 4682 - protein, 452 aa, synthetic construct
QVQLVQSGAEVKKPGSSVKVSCKASPRGFYGYHMHWVRQAPGQGLEWMGFINPYTNDIQYNERFRGRVTITSDESTTTAYMELSSLRSEDTAVYYCAMGNGKWGDGAYRFFDLWGQGTLVTVSSASTKGPSVFPLAPSSKSTSGGTAALGCLVKDYFPEPVTVSWNSGALTSGVHTFPAVLQSSGLYSLSSVVTVPSSSLGTQTYICNVNHKPSNTKVDKRVEPKSCDKTHTCPPCPAPELLGGPSVFLFPPKPKDTLMISRTPEVTCVVVDVSHEDPEVKFNWYVDGVEVHNAKTKPREEQYASTYRVVSVLTVLHQDWLNGKEYKCKVSNKALPAPIEKTISKAKGQPREPQVYTLPPCREEMTKNQVSLWCLVKGFYPSDIAVEWESNGQPENNYKTTPPVLDSDGSFFLYSKLTVDKSRWQQGNVFSCSVMHEALHNHYTQKSLSLSP

SEQ ID NO: 4683 - protein, 471 aa, synthetic construct; identical to SEQ ID NO: 4678

SEQ ID NO: 4684 - protein, 471 aa, synthetic construct; identical to SEQ ID NO: 4678

SEQ ID NO: 4685 - protein, 452 aa, synthetic construct
QVQLVQSGAEVKKPGSSVKVSCKASPRGFYGYHMHWVRQAPGQGLEWMGFINPYNNHIQYNERFRGRVTITSDESTTTAYMELSSLRSEDTAVYYCALGNGKWGDGAYRFFDFWGQGTLVTVSSASTKGPSVFPLAPSSKSTSGGTAALGCLVKDYFPEPVTVSWNSGALTSGVHTFPAVLQSSGLYSLSSVVTVPSSSLGTQTYICNVNHKPSNTKVDKRVEPKSCDKTHTCPPCPAPELLGGPSVFLFPPKPKDTLMISRTPEVTCVVVDVSHEDPEVKFNWYVDGVEVHNAKTKPREEQYASTYRVVSVLTVLHQDWLNGKEYKCKVSNKALPAPIEKTISKAKGQPREPQVYTLPPCREEMTKNQVSLWCLVKGFYPSDIAVEWESNGQPENNYKTTPPVLDSDGSFFLYSKLTVDKSRWQQGNVFSCSVMHEALHNHYTQKSLSLSP

SEQ ID NO: 4686 - protein, 452 aa, synthetic construct
QVQLVQSGAEVKKPGSSVKVSCKASPRGFYGYHMHWVRQAPGQGLEWMGFINPYNNHIQYNERFRGRVTITSDESTTTAYMELSSLRSEDTAVYYCALGEGKWGDGAYRFFDFWGQGTLVTVSSASTKGPSVFPLAPSSKSTSGGTAALGCLVKDYFPEPVTVSWNSGALTSGVHTFPAVLQSSGLYSLSSVVTVPSSSLGTQTYICNVNHKPSNTKVDKRVEPKSCDKTHTCPPCPAPELLGGPSVFLFPPKPKDTLMISRTPEVTCVVVDVSHEDPEVKFNWYVDGVEVHNAKTKPREEQYASTYRVVSVLTVLHQDWLNGKEYKCKVSNKALPAPIEKTISKAKGQPREPQVYTLPPCREEMTKNQVSLWCLVKGFYPSDIAVEWESNGQPENNYKTTPPVLDSDGSFFLYSKLTVDKSRWQQGNVFSCSVMHEALHNHYTQKSLSLSP

SEQ ID NO: 4687 - protein, 452 aa, synthetic construct
QVQLVQSGAEVKKPGSSVKVSCKASPRGFYGYHMHWVRQAPGQGLEWMGFINPYNNHIQYNERFRGRVTITSDESTTTAYMELSSLRSEDTAVYYCALGAGKWGDGAYRFFDFWGQGTLVTVSSASTKGPSVFPLAPSSKSTSGGTAALGCLVKDYFPEPVTVSWNSGALTSGVHTFPAVLQSSGLYSLSSVVTVPSSSLGTQTYICNVNHKPSNTKVDKRVEPKSCDKTHTCPPCPAPELLGGPSVFLFPPKPKDTLMISRTPEVTCVVVDVSHEDPEVKFNWYVDGVEVHNAKTKPREEQYASTYRVVSVLTVLHQDWLNGKEYKCKVSNKALPAPIEKTISKAKGQPREPQVYTLPPCREEMTKNQVSLWCLVKGFYPSDIAVEWESNGQPENNYKTTPPVLDSDGSFFLYSKLTVDKSRWQQGNVFSCSVMHEALHNHYTQKSLSLSP

SEQ ID NO: 4688 - protein, 446 aa, synthetic construct
QIQLQESGPGLVKPSQSLSLTCSVTGFSINTGGYHWNWIRQFPGKKLEWMGYIYSSGSTSYNPSLKSRISITRDTSKNQFFLQLNSVTTEDTATYYCARGNWHYFDFWGQGTMVTVSSASTKGPSVFPLAPSSKSTSGGTAALGCLVKDYFPEPVTVSWNSGALTSGVHTFPAVLQSSGLYSLSSVVTVPSSSLGTQTYICNVNHKPSNTKVDKRVEPKSCDKTHTCPPCPAPELLGGPSVFLFPPKPKDTLMISRTPEVTCVVVDVSHEDPEVKFNWYVDGVEVHNAKTKPREEQYASTYRVVSVLTVLHQDWLNGKEYKCKVSNKALPAPIEKTISKAKGQPREPQVCTLPPSREEMTKNQVSLSCAVKGFYPSDIAVEWESNGQPENNYKTTPPVLDSDGSFFLVSKLTVDKSRWQQGNVFSCSVMHEALHNHYTQKSLSLSP

SEQ ID NO: 4689 - protein, 446 aa, synthetic construct
QIQLQESGPGLVKPSQSLSLTCSVTGFSINTGGYHWNWIRQFPGKKLEWMGYIYSSGSTSYNPSLKSRISITRDTSKNQFFLQLNSVTTEDTATYYCARGNWHYFDFWGQGTMVTVSSASTKGPSVFPLAPSSKSTSGGTAALGCLVKDYFPEPVTVSWNSGALTSGVHTFPAVLQSSGLYSLSSVVTVPSSSLGTQTYICNVNHKPSNTKVDKRVEPKSCDKTHTCPPCPAPELLGGPSVFLFPPKPKDTLMISRTPEVTCVVVDVSHEDPEVKFNWYVDGVEVHNAKTKPREEQYNSTYRVVSVLTVLHQDWLNGKEYKCKVSNKALPAPIEKTISKAKGQPREPQVCTLPPSREEMTKNQVSLSCAVKGFYPSDIAVEWESNGQPENNYKTTPPVLDSDGSFFLVSKLTVDKSRWQQGNVFSCSVMHEALHNHYTQKSLSLSP

SEQ ID NO: 4690 - protein, 446 aa, synthetic construct
QIQLQESGPGLVKPSQSLSLTCSVTGFSINTGGYHWNWIRQFPGKKLEWMGYIYSSGTTRYNPSLKSRISITRDTSKNQFFLQLNSVTPEDTATYYCTRGNWHYFDYWGQGTLVAVSSASTKGPSVFPLAPSSKSTSGGTAALGCLVKDYFPEPVTVSWNSGALTSGVHTFPAVLQSSGLYSLSSVVTVPSSSLGTQTYICNVNHKPSNTKVDKRVEPKSCDKTHTCPPCPAPELLGGPSVFLFPPKPKDTLMISRTPEVTCVVVDVSHEDPEVKFNWYVDGVEVHNAKTKPREEQYASTYRVVSVLTVLHQDWLNGKEYKCKVSNKALPAPIEKTISKAKGQPREPQVCTLPPSREEMTKNQVSLSCAVKGFYPSDIAVEWESNGQPENNYKTTPPVLDSDGSFFLVSKLTVDKSRWQQGNVFSCSVMHEALHNHYTQKSLSLSP

SEQ ID NO: 4691 - protein, 446 aa, synthetic construct
QIQLQESGPGLVKPSQSLSLTCSVTGFSINTGGYHWNWIRQFPGKKLEWMGYIYSSGTTRYNPSLKSRISITRDTSKNQFFLQLNSVTPEDTATYYCTRGNWHYFDYWGQGTLVAVSSASTKGPSVFPLAPSSKSTSGGTAALGCLVKDYFPEPVTVSWNSGALTSGVHTFPAVLQSSGLYSLSSVVTVPSSSLGTQTYICNVNHKPSNTKVDKRVEPKSCDKTHTCPPCPAPELLGGPSVFLFPPKPKDTLMISRTPEVTCVVVDVSHEDPEVKFNWYVDGVEVHNAKTKPREEQYNSTYRVVSVLTVLHQDWLNGKEYKCKVSNKALPAPIEKTISKAKGQPREPQVCTLPPSREEMTKNQVSLSCAVKGFYPSDIAVEWESNGQPENNYKTTPPVLDSDGSFFLVSKLTVDKSRWQQGNVFSCSVMHEALHNHYTQKSLSLSP

SEQ ID NO: 4692 - protein, 467 aa, synthetic construct
METDTLLLWVLLLWVPGSTGQVQLVQSGAEVKKPGSSVKVSCKASGYSFTTYYIHWVRQAPGQGLEWMGWFFPGSGNIKYNEKFKGRVTITADTSTSTAYMELSSLRSEDTAVYYCAGSYYSYDVLDYWGQGTTVTVSSASTKGPSVFPLAPSSKSTSGGTAALGCLVKDYFPEPVTVSWNSGALTSGVHTFPAVLQSSGLYSLSSVVTVPSSSLGTQTYICNVNHKPSNTKVDKRVEPKSCDKTHTCPPCPAPELLGGPSVFLFPPKPKDTLMISRTPEVTCVVVDVSHEDPEVKFNWYVDGVEVHNAKTKPREEQYNSTYRVVSVLTVLHQDWLNGKEYKCKVSNKALPAPIEKTISKAKGQPREPQVYTLPPSREEMTKNQVSLTCLVKGFYPSDIAVEWESNGQPENNYKTTPPVLDSDGSFFLYSKLTVDKSRWQQGNVFSCSVMHEALHNHYTQKSLSLSP

SEQ ID NO: 4693 - protein, 245 aa, synthetic construct
METDTLLLWVLLLWVPGSTGDKTHTCPPCPAPELLGGPSVFLFPPKPKDTLMISRTPEVTCVVVDVSHEDPEVKFNWYVDGVEVHNAKTKPREEQYNSTYRVVSVLTVLHQDWLNGKEYKCKVSNKALPAPIEKTISKAKGQPREPQVYTLPPCREEMTKNQVSLWCLVKGFYPSDIAVEWESNGQPENNYKTTPPVLDSDGSFFLYSKLTVDKSRWQQGNVFSCSVMHEALHNRFTQKSLSLSP

SEQ ID NO: 4694 - protein, 452 aa, synthetic construct
QVQLVQSGAEVKKPGSSVKVSCKASPRGFYGYHMHWVRQAPGQGLEWMGFINPYNNHIQYNERFRGRVTITSDESTTTAYMELSSLRSEDTAVYYCALGIGKWGDGAYRFFDFWGQGTLVTVSSASTKGPSVFPLAPSSKSTSGGTAALGCLVKDYFPEPVTVSWNSGALTSGVHTFPAVLQSSGLYSLSSVVTVPSSSLGTQTYICNVNHKPSNTKVDKRVEPKSCDKTHTCPPCPAPELLGGPSVFLFPPKPKDTLMISRTPEVTCVVVDVSHEDPEVKFNWYVDGVEVHNAKTKPREEQYASTYRVVSVLTVLHQDWLNGKEYKCKVSNKALPAPIEKTISKAKGQPREPQVYTLPPCREEMTKNQVSLWCLVKGFYPSDIAVEWESNGQPENNYKTTPPVLDSDGSFFLYSKLTVDKSRWQQGNVFSCSVMHEALHNHYTQKSLSLSP

SEQ ID NO: 4695 - protein, 471 aa, synthetic construct; identical to SEQ ID NO: 4678

SEQ ID NO: 4696 - protein, 452 aa, synthetic construct
QVQLVQSGAEVKKPGSSVKVSCKASPRGFYGYHMHWVRQAPGQGLEWMGFINPYNNHIQYNERFRGRVTITSDESTTTAYMELSSLRSEDTAVYYCALGVGKWGDGAYRFFDFWGQGTLVTVSSASTKGPSVFPLAPSSKSTSGGTAALGCLVKDYFPEPVTVSWNSGALTSGVHTFPAVLQSSGLYSLSSVVTVPSSSLGTQTYICNVNHKPSNTKVDKRVEPKSCDKTHTCPPCPAPELLGGPSVFLFPPKPKDTLMISRTPEVTCVVVDVSHEDPEVKFNWYVDGVEVHNAKTKPREEQYASTYRVVSVLTVLHQDWLNGKEYKCKVSNKALPAPIEKTISKAKGQPREPQVYTLPPCREEMTKNQVSLWCLVKGFYPSDIAVEWESNGQPENNYKTTPPVLDSDGSFFLYSKLTVDKSRWQQGNVFSCSVMHEALHNHYTQKSLSLSP

SEQ ID NO: 4697 - skipped

SEQ ID NO: 4698 - protein, 471 aa, synthetic construct; identical to SEQ ID NO: 4678

SEQ ID NO: 4699 - protein, 452 aa, synthetic construct; identical to SEQ ID NO: 4686

SEQ ID NO: 4700 - protein, 452 aa, synthetic construct; identical to SEQ ID NO: 4687

SEQ ID NO: 4701 - protein, 452 aa, synthetic construct; identical to SEQ ID NO: 4677

SEQ ID NO: 4702 - protein, 446 aa, synthetic construct
EIQLLESGGGLVQPGGSLRLSCAVSGFSIIRVGYHWNWVRQAPGKGLEWVGYIHRSGSTSYNPSLKSRFTISRDTSKNTFYLQMNSLRAEDTAVYYCARGDWHYFDYWGQGTMVTVSSASTKGPSVFPLAPSSKSTSGGTAALGCLVKDYFPEPVTVSWNSGALTSGVHTFPAVLQSSGLYSLSSVVTVPSSSLGTQTYICNVNHKPSNTKVDKRVEPKSCDKTHTCPPCPAPELLGGPSVFLFPPKPKDTLMISRTPEVTCVVVDVSHEDPEVKFNWYVDGVEVHNAKTKPREEQYASTYRVVSVLTVLHQDWLNGKEYKCKVSNKALPAPIEKTISKAKGQPREPQVCTLPPSREEMTKNQVSLSCAVKGFYPSDIAVEWESNGQPENNYKTTPPVLDSDGSFFLVSKLTVDKSRWQQGNVFSCSVMHEALHNHYTQKSLSLSP

SEQ ID NO: 4703 - protein, 447 aa, synthetic construct
ITCPPPMSVEHADIWVKSYSLYSRERYICNSGFKRKAGTSSLTECVLNKATNVAHWTTPSLKCIRDPALVHQRPAPPSGGSGGGGSGGGSGGGGSGGGNWVNVISDLKKIEDLIQSMHIDATLYTESDVHPSCKVTAMKCFLLELQVISLESGDASIHDTVENLIILANNSLSSNGNVTESGCKECEELEEKNIKEFLQSFVHIVQMFINTSGGGGSGGGGSDKTHTCPPCPAPELLGGPSVFLFPPKPKDTLMISRTPEVTCVVVDVSHEDPEVKFNWYVDGVEVHNAKTKPREEQYASTYRVVSVLTVLHQDWLNGKEYKCKVSNKALPAPIEKTISKAKGQPREPQVYTLPPCREEMTKNQVSLWCLVKGFYPSDIAVEWESNGQPENNYKTTPPVLDSDGSFFLYSKLTVDKSRWQQGNVFSCSVMHEALHNHYTQKSLSLSP

SEQ ID NO: 4704 - protein, 471 aa, synthetic construct
EIQLLESGGGLVQPGGSLRLSCAVSGFSIIRVGYHWNWVRQAPGKGLEWVGYIHRSGSTSYNPSLKSRFTISRDTSKNTFYLQMNSLRAEDTAVYYCARGDWHYFDYWGQGTMVTVSSGGGGSGGGGSGGGGSGGGGSDSVTTQSPLSLPVTLGQPASISCSGEKLSDKYVHWYQQRPGQSPRMLIYENDRRPSGVPDRFSGSNSGNDATLKISRVEAEDVGVYFCQFWDSTNSAVFGGGTKVEIKDKTHTCPPCPAPELLGGPSVFLFPPKPKDTLMISRTPEVTCVVVDVSHEDPEVKFNWYVDGVEVHNAKTKPREEQYASTYRVVSVLTVLHQDWLNGKEYKCKVSNKALPAPIEKTISKAKGQPREPQVCTLPPSREEMTKNQVSLSCAVKGFYPSDIAVEWESNGQPENNYKTTPPVLDSDGSFFLVSKLTVDKSRWQQGNVFSCSVMHEALHNHYTQKSLSLSP

SEQ ID NO: 4705 - protein, 446 aa, synthetic construct
QVQLVQSGAEVKKPGASVKVSCKASGYTFTDYNIHWVRQAPGQGLEWMGYINPYNGRTGYNQKFKARVTMTVDKSTSTAYMELSSLRSEDTAVYYCARWDGSSYFDYWGQGTLVTVSSASTKGPSVFPLAPSSKSTSGGTAALGCLVKDYFPEPVTVSWNSGALTSGVHTFPAVLQSSGLYSLSSVVTVPSSSLGTQTYICNVNHKPSNTKVDKRVEPKSCDKTHTCPPCPAPELLGGPSVFLFPPKPKDTLMISRTPEVTCVVVDVSHEDPEVKFNWYVDGVEVHNAKTKPREEQYASTYRVVSVLTVLHQDWLNGKEYKCKVSNKALPAPIEKTISKAKGQPREPQVCTLPPSREEMTKNQVSLSCAVKGFYPSDIAVEWESNGQPENNYKTTPPVLDSDGSFFLVSKLTVDKSRWQQGNVFSCSVMHEALHNHYTQKSLSLSP

SEQ ID NO: 4706 - protein, 368 aa, synthetic construct; identical to SEQ ID NO: 3350

SEQ ID NO: 4707 - protein, 449 aa, synthetic construct
QVQLVQSGAEVKKPGSSVKVSCKASGHDFRLTYIHWVRQAPGQGLEWMGRVSAGSGNVKYNEKFKGRVTITADTSTSTAYMELSSLRSEDTAVYYCAVSYYSYDVLDYWGQGTTVTVSSASTKGPSVFPLAPSSKSTSGGTAALGCLVKDYFPEPVTVSWNSGALTSGVHTFPAVLQSSGLYSLSSVVTVPSSSLGTQTYICNVNHKPSNTKVDKRVEPKSCDKTHTCPPCPAPELLGGPSVFLFPPKPKDTLMISRTPEVTCVVVDVSHEDPEVKFNWYVDGVEVHNAKTKPREEQYASTYRVVSVLTVLHQDWLNGKEYKCKVSNKALPAPIEKTISKAKGQPREPQVCTLPPSREEMTKNQVSLSCAVKGFYPSDIAVEWESNGQPENNYKTTPPVLDSDGSFFLVSKLTVDKSRWQQGNVFSCSVMHEALHNHYTQKSLSLSPGK

SEQ ID NO: 4708 - protein, 447 aa, synthetic construct
ITCPPPMSVEHADIWVKSYSLYSRERYICNSGFKRKAGTSSLTECVLNKATNVAHWTTPSLKCIRDPALVHQRPAPPSGGSGGGGSGGGSGGGGSGGGNWVNVISDLKKIEDLIQSMHIDATLYTESDVHPSCKVTAMKCFLLELQVISLESGDASIHDTVENLIILANNSLSSNGNVTESGCKECEELEEKNIKEFLQSFVHIVAMFINTSGGGGSGGGGSDKTHTCPPCPAPELLGGPSVFLFPPKPKDTLMISRTPEVTCVVVDVSHEDPEVKFNWYVDGVEVHNAKTKPREEQYASTYRVVSVLTVLHQDWLNGKEYKCKVSNKALPAPIEKTISKAKGQPREPQVYTLPPCREEMTKNQVSLWCLVKGFYPSDIAVEWESNGQPENNYKTTPPVLDSDGSFFLYSKLTVDKSRWQQGNVFSCSVMHEALHNHYTQKSLSLSP

SEQ ID NO: 4709 - protein, 447 aa, synthetic construct
ITCPPPMSVEHADIWVKSYSLYSRERYICNSGFKRKAGTSSLTECVLNKATNVAHWTTPSLKCIRDPALVHQRPAPPSGGSGGGGSGGGSGGGGSGGGNWVNVISDLKKIEDLIQSMHIDATLYTESDVHPSCKVTAMKCFLLELQVISLESGDASIHDTVEQLIILANNSLSSNGNVTESGCKECEELEEKNIKEFLQSFVHIVQMFINTSGGGGSGGGGSDKTHTCPPCPAPELLGGPSVFLFPPKPKDTLMISRTPEVTCVVVDVSHEDPEVKFNWYVDGVEVHNAKTKPREEQYASTYRVVSVLTVLHQDWLNGKEYKCKVSNKALPAPIEKTISKAKGQPREPQVYTLPPCREEMTKNQVSLWCLVKGFYPSDIAVEWESNGQPENNYKTTPPVLDSDGSFFLYSKLTVDKSRWQQGNVFSCSVMHEALHNHYTQKSLSLSP

SEQ ID NO: 4710 - protein, 447 aa, synthetic construct
QVQLVQSGAEVKKPGASVKVSCKASGFNIKSAYMHWVRQAPGQEPGCMGRIDPATGKTKYAPKFQARVTMTADTSINTAYTELSSLRSEDTATYYCARSLNWDYGLDYWGQGTLVTVSSASTKGPSVFPLAPSSKSTSGGTAALGCLVKDYFPEPVTVSWNSGALTSGVHTFPAVLQSSGLYSLSSVVTVPSSSLGTQTYICNVNHKPSNTKVDKRVEPKSCDKTHTCPPCPAPELLGGPSVFLFPPKPKDTLMISRTPEVTCVVVDVSHEDPEVKFNWYVDGVEVHNAKTKPREEQYASTYRVVSVLTVLHQDWLNGKEYKCKVSNKALPAPIEKTISKAKGQPREPQVCTLPPSREEMTKNQVSLSCAVKGFYPSDIAVEWESNGQPENNYKTTPPVLDSDGSFFLVSKLTVDKSRWQQGNVFSCSVMHEALHNHYTQKSLSLSP

SEQ ID NO: 4711 - protein, 447 aa, synthetic construct
QVQLVQSGAEVKKPGASVKVSCKASGFNIKSAYMHWVRQAPGQGLEWMGRIDPATGKTKYAPKFQARVTMTADTSTNTAYMELSSLRSEDTAVYYCARSLNWDYGLDYWGQGTLVTVSSASTKGPSVFPLAPSSKSTSGGTAALGCLVKDYFPEPVTVSWNSGALTSGVHTFPAVLQSSGLYSLSSVVTVPSSSLGTQTYICNVNHKPSNTKVDKRVEPKSCDKTHTCPPCPAPELLGGPSVFLFPPKPKDTLMISRTPEVTCVVVDVSHEDPEVKFNWYVDGVEVHNAKTKPREEQYASTYRVVSVLTVLHQDWLNGKEYKCKVSNKALPAPIEKTISKAKGQPREPQVCTLPPSREEMTKNQVSLSCAVKGFYPSDIAVEWESNGQPENNYKTTPPVLDSDGSFFLVSKLTVDKSRWQQGNVFSCSVMHEALHNHYTQKSLSLSP

SEQ ID NO: 4712 - protein, 449 aa, synthetic construct
QIQLQQSGPEVVKPGASVQISCKASGYTFSGSWMNWVKQRPGKGLEWIGRIYPGDGDTDYSGKFKGRATLTADKSSSTAYMRLSSLTSEDSAVYFCARSGYFNYVPVFDYWGQGTTLSVSSASTKGPSVFPLAPSSKSTSGGTAALGCLVKDYFPEPVTVSWNSGALTSGVHTFPAVLQSSGLYSLSSVVTVPSSSLGTQTYICNVNHKPSNTKVDKRVEPKSCDKTHTCPPCPAPELLGGPSVFLFPPKPKDTLMISRTPEVTCVVVDVSHEDPEVKFNWYVDGVEVHNAKTKPREEQYASTYRVVSVLTVLHQDWLNGKEYKCKVSNKALPAPIEKTISKAKGQPREPQVCTLPPSREEMTKNQVSLSCAVKGFYPSDIAVEWESNGQPENNYKTTPPVLDSDGSFFLVSKLTVDKSRWQQGNVFSCSVMHEALHNHYTQKSLSLSP

SEQ ID NO: 4713 - protein, 448 aa, synthetic construct
NVQLQESGPGLVKPSQSLSLTCSVAGYSITSGYFWNWIRQFPGNKLEWMGYISYDGSNNYNPSLKNRISITRDTSKNQFFLKLNSVTTEDTATYYCASPSPGTGYAVDYWGQGTSVTVSSASTKGPSVFPLAPSSKSTSGGTAALGCLVKDYFPEPVTVSWNSGALTSGVHTFPAVLQSSGLYSLSSVVTVPSSSLGTQTYICNVNHKPSNTKVDKRVEPKSCDKTHTCPPCPAPELLGGPSVFLFPPKPKDTLMISRTPEVTCVVVDVSHEDPEVKFNWYVDGVEVHNAKTKPREEQYASTYRVVSVLTVLHQDWLNGKEYKCKVSNKALPAPIEKTISKAKGQPREPQVCTLPPSREEMTKNQVSLSCAVKGFYPSDIAVEWESNGQPENNYKTTPPVLDSDGSFFLVSKLTVDKSRWQQGNVFSCSVMHEALHNHYTQKSLSLSP

SEQ ID NO: 4714 - protein, 449 aa, synthetic construct
QVQLQQPGAELVRPGASVKLSCKASGYTFTNYWMNWVKQRPGQGLEWIGMIHPSDSATRLNQKFKDKATLTVDKSSSTAYMQLSSPTSEDSAVYYCARWAYYGNLYAIDYWGQGTSVTVSSAKTTAPSVYPLAPVCGDTTGSSVTLGCLVKGYFPEPVTLTWNSGSLSSGVHTFPAVLQSDLYTLSSSVTVTSSTWPSQSITCNVAHPASSTKVDKKIEPRGPTIKPCPPCKCPAPNAAGGPSVFIFPPKIKDVLMISLSPIVTCVVVDVSEDDPDVQISWFVNNVEVHTAQTQTHREDYNSTLRVVSALPIQHQDWMSGKEFKCKVNNKDLGAPIERTISKPKGSVRAPQVCVLPPPEEEMTKKQVTLSCAVTDFMPEDIYVEWTNNGKTELNYKNTEPVLDSDGSYFMVSKLRVEKKNWVERNSYSCSVVHEGLHNHHTTKSFSRTP

SEQ ID NO: 4715 - protein, 369 aa, synthetic construct
APTSSSTKKTQLQLEHLLLDLQMILNGINNYKNPKLTRMLTFKFYMPKKATELKHLQCLEEELKPLEEVLNLAQSKNFHLRPRDLISNINVIVLELKGSETTFMCEYADETATIVEFLNRWITFCQSIISTLTGGGGSGGGGSTIKPCPPCKCPAPNAAGGPSVFIFPPKIKDVLMISLSPIVTCVVVDVSEDDPDVQISWFVNNVEVHTAQTQTHREDYNSTLRVVSALPIQHQDWMSGKEFKCKVNNKDLGAPIERTISKPKGSVRAPQVYVLPPCEEEMTKKQVTLWCMVTDFMPEDIYVEWTNNGKTELNYKNTEPVLDSDGSYFMYSKLRVEKKNWVERNSYSCSVVHEGLHNHHTTKSFSRTP

SEQ ID NO: 4716 - protein, 328 aa, synthetic construct
AKTTAPSVYPLAPVCGDTTGSSVTLGCLVKGYFPEPVTLTWNSGSLSSGVHTFPAVLQSDLYTLSSSVTVTSSTWPSQSITCNVAHPASSTKVDKKIEPRGPTIKPCPPCKCPAPNAAGGPSVFIFPPKIKDVLMISLSPIVTCVVVDVSEDDPDVQISWFVNNVEVHTAQTQTHREDYNSTLRVVSALPIQHQDWMSGKEFKCKVNNKDLGAPIERTISKPKGSVRAPQVCVLPPPEEEMTKKQVTLSCAVTDFMPEDIYVEWTNNGKTELNYKNTEPVLDSDGSYFMVSKLRVEKKNWVERNSYSCSVVHEGLHNHHTTKSFSRTP

SEQ ID NO: 4717 - protein, 226 aa, synthetic construct
TIKPCPPCKCPAPNAAGGPSVFIFPPKIKDVLMISLSPIVTCVVVDVSEDDPDVQISWFVNNVEVHTAQTQTHREDYNSTLRVVSALPIQHQDWMSGKEFKCKVNNKDLGAPIERTISKPKGSVRAPQVCVLPPPEEEMTKKQVTLSCAVTDFMPEDIYVEWTNNGKTELNYKNTEPVLDSDGSYFMVSKLRVEKKNWVERNSYSCSVVHEGLHNHHTTKSFSRTP

SEQ ID NO: 4718 - protein, 226 aa, synthetic construct
TIKPCPPCKCPAPNAAGGPSVFIFPPKIKDVLMISLSPIVTCVVVDVSEDDPDVQISWFVNNVEVHTAQTQTHREDYNSTLRVVSALPIQHQDWMSGKEFKCKVNNKDLGAPIERTISKPKGSVRAPQVYVLPPCEEEMTKKQVTLWCMVTDFMPEDIYVEWTNNGKTELNYKNTEPVLDSDGSYFMYSKLRVEKKNWVERNSYSCSVVHEGLHNHHTTKSFSRTP

SEQ ID NO: 4719 - protein, 449 aa, synthetic construct
EVQLVESGGGLVQPGASLKLSCVASGFTFSDYWMSWVRQTPGKTMEWIGNIKYDGSHTNYAPSLKNRFTISRDNAKSTLFLQMSNVRSEDTATYYCTRESHYGYIYPFDYWGQGVMVTVSSAKTTAPSVYPLAPVCGDTTGSSVTLGCLVKGYFPEPVTLTWNSGSLSSGVHTFPAVLQSDLYTLSSSVTVTSSTWPSQSITCNVAHPASSTKVDKKIEPRGPTIKPCPPCKCPAPNAAGGPSVFIFPPKIKDVLMISLSPIVTCVVVDVSEDDPDVQISWFVNNVEVHTAQTQTHREDYNSTLRVVSALPIQHQDWMSGKEFKCKVNNKDLGAPIERTISKPKGSVRAPQVCVLPPPEEEMTKKQVTLSCAVTDFMPEDIYVEWTNNGKTELNYKNTEPVLDSDGSYFMVSKLRVEKKNWVERNSYSCSVVHEGLHNHHTTKSFSRTP

SEQ ID NO: 4720 - protein, 369 aa, synthetic construct; identical to SEQ ID NO: 4715

SEQ ID NO: 4721-5999 - skipped (1279 entries)

SEQ ID NO: 6000 - protein, 5 aa, synthetic construct
GYHWN

SEQ ID NO: 6001 - protein, 16 aa, synthetic construct
YIYSSGSTSYNPSLKS

SEQ ID NO: 6002 - protein, 8 aa, synthetic construct
GNWHYFDF

SEQ ID NO: 6003 - protein, 32 aa, synthetic construct
QIQLQESGPGLVKPSQSLSLTCSVTGFSINTG

SEQ ID NO: 6004 - protein, 14 aa, synthetic construct
WIRQFPGKKLEWMG

SEQ ID NO: 6005 - protein, 32 aa, synthetic construct
RISITRDTSKNQFFLQLNSVTTEDTATYYCAR

SEQ ID NO: 6006 - protein, 246 aa, synthetic construct
QVQLVQSGAEVKKPGSSVKVSCKASGHDFRDFYIHWVRQAPGQGLEWMGRVYPGSGSYRYNEKFKGRVTITADTSTSTAYMELSSLRSEDTAVYYCAGSYYSYDVLDYWGQGTTVTVSSGGGGSGGGGSGGGGSGGGGSDIQMTQSPSFLSASVGDRVTITCKASQNVDDRVAWYQQKPGKAPKALIYSSSHRYKGVPSRFSGSGSGTEFTLTISSLQPEDFATYFCQQFKSYPLTFGQGTKLEIK

SEQ ID NO: 6007 - protein, 5 aa, synthetic construct
GYHWN

SEQ ID NO: 6008 - protein, 16 aa, synthetic construct
YIYSSGTTRYNPSLKS

SEQ ID NO: 6009 - protein, 8 aa, synthetic construct
GNWHYFDY

SEQ ID NO: 6010 - protein, 32 aa, synthetic construct; identical to SEQ ID NO: 6003

SEQ ID NO: 6011 - protein, 14 aa, synthetic construct
WIRQFPGKKLEWMG

SEQ ID NO: 6012 - protein, 32 aa, synthetic construct
RISITRDTSKNQFFLQLNSVTPEDTATYYCTR

SEQ ID NO: 6013 - protein, 11 aa, synthetic construct
WGQGTLVAVSS

SEQ ID NO: 6014 - protein, 32 aa, synthetic construct
QIQLQESGPGLVKPSETLSLTCTVSGFSINTG

SEQ ID NO: 6015 - protein, 14 aa, synthetic construct
WIRQPAGKGLEWIG

SEQ ID NO: 6016 - protein, 32 aa, synthetic construct
RVTMSRDTSKNQFSLKLSSVTAADTAVYYCAR

SEQ ID NO: 6017 - skipped

SEQ ID NO: 6018 - protein, 32 aa, synthetic construct
QIQLQESGPGLVKPSQTLSLTCTVSGFSINTG

SEQ ID NO: 6019 - protein, 14 aa, synthetic construct
WIRQHPGKGLEWIG

SEQ ID NO: 6020 - protein, 32 aa, synthetic construct
LVTISRDTSKNQFSLKLSSVTAADTAVYYCAR

SEQ ID NO: 6021 - skipped

SEQ ID NO: 6022 - protein, 32 aa, synthetic construct
EIQLLESGGGLVQPGGSLRLSCAVSGFSINTG

SEQ ID NO: 6023 - protein, 14 aa, synthetic construct
WVRQAPGKGLEWVG

SEQ ID NO: 6024-6025 - skipped (2 entries)

SEQ ID NO: 6026 - protein, 32 aa, synthetic construct
QIQLVQSGAEVKKPGSSVKVSCKVSGFSINTG

SEQ ID NO: 6027 - protein, 14 aa, synthetic construct
WVRQAPGQGLEWMG

SEQ ID NO: 6028 - protein, 32 aa, synthetic construct
RVTITRDTSTNTFYMELSSLRSEDTAVYYCAR

SEQ ID NO: 6029 - skipped

SEQ ID NO: 6030 - protein, 32 aa, synthetic construct
EIQLVESGGGLVQPGGSLRLSCAVSGFSINTG

SEQ ID NO: 6031 - skipped

SEQ ID NO: 6032 - protein, 14 aa, synthetic construct
WVRQAPGKGLEWVG

SEQ ID NO: 6033 - protein, 32 aa, synthetic construct
RFTISRDTAKNSFYLQMNSLRAEDTAVYYCAR

SEQ ID NO: 6034 - skipped

SEQ ID NO: 6035 - protein, 32 aa, synthetic construct
QIQLVQSGAEVKKPGASVKVSCKVSGFSINTG

SEQ ID NO: 6036 - protein, 14 aa, synthetic construct
WVRQAPGQGLEWMG

SEQ ID NO: 6037 - protein, 32 aa, synthetic construct
RVTMTRDTSTNTFYMELSSLRSEDTAVYYCAR

SEQ ID NO: 6038 - skipped

SEQ ID NO: 6039 - protein, 32 aa, synthetic construct; identical to SEQ ID NO: 6018

SEQ ID NO: 6040 - protein, 14 aa, synthetic construct
WIRQHPGKGLEWIG

SEQ ID NO: 6041 - protein, 32 aa, synthetic construct; identical to SEQ ID NO: 6020

SEQ ID NO: 6042 - protein, 11 aa, synthetic construct
WGQGTLVTVSS

SEQ ID NO: 6043 - protein, 32 aa, synthetic construct; identical to SEQ ID NO: 6014

SEQ ID NO: 6044 - protein, 14 aa, synthetic construct
WIRQPAGKGLEWIG

SEQ ID NO: 6045 - protein, 32 aa, synthetic construct; identical to SEQ ID NO: 6016

SEQ ID NO: 6046 - protein, 11 aa, synthetic construct
WGQGTLVTVSS

SEQ ID NO: 6047 - protein, 32 aa, synthetic construct; identical to SEQ ID NO: 6022

SEQ ID NO: 6048 - protein, 14 aa, synthetic construct
WVRQAPGKGLEWVG

SEQ ID NO: 6049 - skipped

SEQ ID NO: 6050 - protein, 11 aa, synthetic construct
WGQGTLVTVSS

SEQ ID NO: 6051 - protein, 32 aa, synthetic construct
QIQLVESGGGLVKPGGSLRLSCAVSGFSINTG

SEQ ID NO: 6052 - protein, 14 aa, synthetic construct
WIRQAPGKGLEWVG

SEQ ID NO: 6053 - protein, 32 aa, synthetic construct; identical to SEQ ID NO: 6033

SEQ ID NO: 6054 - protein, 11 aa, synthetic construct
WGQGTLVTVSS

SEQ ID NO: 6055 - protein, 32 aa, synthetic construct; identical to SEQ ID NO: 6035

SEQ ID NO: 6056 - protein, 14 aa, synthetic construct
WVRQAPGQGLEWMG

SEQ ID NO: 6057 - protein, 32 aa, synthetic construct; identical to SEQ ID NO: 6037

SEQ ID NO: 6058 - protein, 11 aa, synthetic construct
WGQGTLVTVSS

SEQ ID NO: 6059 - protein, 32 aa, synthetic construct
EIQLVQSGAEVKKPGATVKISCKVSGFSINTG

SEQ ID NO: 6060 - protein, 14 aa, synthetic construct
WVQQAPGKGLEWMG

SEQ ID NO: 6061 - protein, 32 aa, synthetic construct; identical to SEQ ID NO: 6028

SEQ ID NO: 6062 - protein, 11 aa, synthetic construct
WGQGTLVTVSS

SEQ ID NO: 6063 - protein, 11 aa, synthetic construct
SGERLSDKYVH

SEQ ID NO: 6064 - protein, 7 aa, synthetic construct
ENDKRPS

SEQ ID NO: 6065 - skipped

SEQ ID NO: 6066 - protein, 22 aa, synthetic construct
SYTLTQPPLLSVALGHKATITC

SEQ ID NO: 6067 - protein, 15 aa, synthetic construct
WYQQKPGRAPVMVIY

SEQ ID NO: 6068 - skipped

SEQ ID NO: 6069 - protein, 10 aa, synthetic construct
FGSGTQLTVL

SEQ ID NO: 6070 - protein, 11 aa, synthetic construct
SGENLSDKYVH

SEQ ID NO: 6071 - protein, 7 aa, synthetic construct
ENEKRPS

SEQ ID NO: 6072 - protein, 10 aa, synthetic construct
HYWESINSVV

SEQ ID NO: 6073 - protein, 22 aa, synthetic construct
SYTLTQPPSLSVAPGQKATIIC

SEQ ID NO: 6074 - protein, 15 aa, synthetic construct
WYQQKPGRAPVMVIY

SEQ ID NO: 6075 - protein, 32 aa, synthetic construct
GIPDQFSGSNSGNIATLTISKAQPGSEADYYC

SEQ ID NO: 6076 - protein, 10 aa, synthetic construct
FGSGTHLTVL

SEQ ID NO: 6077 - protein, 22 aa, synthetic construct
QSVTTQPPSVSGAPGQRVTISC

SEQ ID NO: 6078 - protein, 15 aa, synthetic construct
WYQQLPGTAPKMLIY

SEQ ID NO: 6079 - protein, 32 aa, synthetic construct
GVPDRFSGSNSGNSASLAITGLQAEDEADYYC

SEQ ID NO: 6080 - protein, 10 aa, synthetic construct
FGGGTQLTVL

SEQ ID NO: 6081 - protein, 22 aa, synthetic construct
QSVTTQPPSASGTPGQRVTISC

SEQ ID NO: 6082 - protein, 15 aa, synthetic construct
WYQQLPGTAPKMLIY

SEQ ID NO: 6083 - protein, 32 aa, synthetic construct
GVPDRFSGSNSGNSASLAISGLQSEDEADYYC

SEQ ID NO: 6084 - skipped

SEQ ID NO: 6085 - protein, 22 aa, synthetic construct
QSVTTQPPSASGTPGQRVTISC

SEQ ID NO: 6086 - protein, 15 aa, synthetic construct
WYQQLPGTAPKMLIY

SEQ ID NO: 6087 - protein, 32 aa, synthetic construct
GVPDRFSGSNSGNSASLAISGLRSEDEADYYC

SEQ ID NO: 6088 - skipped

SEQ ID NO: 6089 - protein, 22 aa, synthetic construct
SSETTQPHSVSVATAQMARITC

SEQ ID NO: 6090 - protein, 15 aa, synthetic construct
WYQQKPGQDPVMVIY

SEQ ID NO: 6091 - protein, 32 aa, synthetic construct
GIPERFSGSNPGNTATLTISRIEAGDEADYYC

SEQ ID NO: 6092 - skipped

SEQ ID NO: 6093 - protein, 23 aa, synthetic construct
DIQMTQSPSTLSASVGDRVTITC

SEQ ID NO: 6094 - protein, 15 aa, synthetic construct
WYQQKPGKAPKMLIY

SEQ ID NO: 6095 - protein, 32 aa, synthetic construct
GVPSRFSGSNSGNEATLTISSLQPDDFATYYC

SEQ ID NO: 6096 - protein, 10 aa, synthetic construct
FGQGTKVEIK

SEQ ID NO: 6097 - protein, 22 aa, synthetic construct
QYVLTQPPSASGTPGQRVTISC

SEQ ID NO: 6098 - protein, 15 aa, synthetic construct
WYQQLPGTAPKMLIY

SEQ ID NO: 6099 - protein, 32 aa, synthetic construct; identical to SEQ ID NO: 6083

SEQ ID NO: 6100 - protein, 10 aa, synthetic construct
FGEGTELTVL

SEQ ID NO: 6101 - protein, 22 aa, synthetic construct
QYVLTQPPSASGTPGQRVTISC

SEQ ID NO: 6102 - protein, 15 aa, synthetic construct
WYQQLPGTAPKMLIY

SEQ ID NO: 6103 - protein, 32 aa, synthetic construct; identical to SEQ ID NO: 6087

SEQ ID NO: 6104 - protein, 10 aa, synthetic construct
FGEGTELTVL

SEQ ID NO: 6105 - protein, 22 aa, synthetic construct
SYELTQPPSVSVSPGQTASITC

SEQ ID NO: 6106 - protein, 15 aa, synthetic construct
WYQQKPGQSPVMVIY

SEQ ID NO: 6107 - protein, 32 aa, synthetic construct
GIPERFSGSNSGNTATLTISGTQAMDEADYYC

SEQ ID NO: 6108 - protein, 10 aa, synthetic construct
FGEGTELTVL

SEQ ID NO: 6109 - protein, 23 aa, synthetic construct
DYVLTQSPLSLPVTPGEPASISC

SEQ ID NO: 6110 - protein, 15 aa, synthetic construct
WYLQKPGQSPQMLIY

SEQ ID NO: 6111 - protein, 32 aa, synthetic construct
GVPDRFSGSNSGNDATLKISRVEAEDVGVYYC

SEQ ID NO: 6112 - protein, 10 aa, synthetic construct
FGQGTKVEIK

SEQ ID NO: 6113 - protein, 23 aa, synthetic construct
AYQLTQSPSSLSASVGDRVTITC

SEQ ID NO: 6114 - protein, 15 aa, synthetic construct
WYQQKPGKAPKMLIY

SEQ ID NO: 6115 - protein, 32 aa, synthetic construct
GVPSRFSGSNSGNDATLTISSLQPEDFATYYC

SEQ ID NO: 6116 - protein, 10 aa, synthetic construct
FGQGTKVEIK

SEQ ID NO: 6117 - protein, 23 aa, synthetic construct
EYVLTQSPATLSVSPGERATLSC

SEQ ID NO: 6118 - protein, 15 aa, synthetic construct
WYQQKPGQAPRMLIY

SEQ ID NO: 6119 - protein, 32 aa, synthetic construct
GIPARFSGSNSGNEATLTISSLQSEDFAVYYC

SEQ ID NO: 6120 - protein, 10 aa, synthetic construct
FGQGTKVEIK

SEQ ID NO: 6121 - protein, 118 aa, synthetic construct
QIQLQESGPGLVKPSQSLSLTCSVTGFSINTGGYHWNWIRQFPGKKLEWMGYIYSSGSTSYNPSLKSRISITRDTSKNQFFLQLNSVTTEDTATYYCARGNWHYFDFWGQGTMVTVSS

SEQ ID NO: 6122 - protein, 118 aa, synthetic construct
QIQLQESGPGLVKPSQSLSLTCSVTGFSINTGGYHWNWIRQFPGKKLEWMGYIYSSGTTRYNPSLKSRISITRDTSKNQFFLQLNSVTPEDTATYYCTRGNWHYFDYWGQGTLVAVSS

SEQ ID NO: 6123 - protein, 118 aa, synthetic construct
QIQLQESGPGLVKPSETLSLTCTVSGFSINTGGYHWNWIRQPAGKGLEWIGYIYSSGSTSYNPSLKSRVTMSRDTSKNQFSLKLSSVTAADTAVYYCARGNWHYFDFWGQGTMVTVSS

SEQ ID NO: 6124 - protein, 118 aa, synthetic construct
QIQLQESGPGLVKPSQTLSLTCTVSGFSINTGGYHWNWIRQHPGKGLEWIGYIYSSGSTSYNPSLKSLVTISRDTSKNQFSLKLSSVTAADTAVYYCARGNWHYFDFWGQGTMVTVSS

SEQ ID NO: 6125 - protein, 118 aa, synthetic construct
EIQLLESGGGLVQPGGSLRLSCAVSGFSINTGGYHWNWVRQAPGKGLEWVGYIYSSGSTSYNPSLKSRFTISRDTSKNTFYLQMNSLRAEDTAVYYCARGNWHYFDFWGQGTMVTVSS

SEQ ID NO: 6126 - protein, 118 aa, synthetic construct
QIQLVQSGAEVKKPGSSVKVSCKVSGFSINTGGYHWNWVRQAPGQGLEWMGYIYSSGSTSYNPSLKSRVTITRDTSTNTFYMELSSLRSEDTAVYYCARGNWHYFDFWGQGTMVTVSS

SEQ ID NO: 6127 - protein, 118 aa, synthetic construct
EIQLVESGGGLVQPGGSLRLSCAVSGFSINTGGYHWNWVRQAPGKGLEWVGYIYSSGSTSYNPSLKSRFTISRDTAKNSFYLQMNSLRAEDTAVYYCARGNWHYFDFWGQGTMVTVSS

SEQ ID NO: 6128 - protein, 118 aa, synthetic construct
QIQLVQSGAEVKKPGASVKVSCKVSGFSINTGGYHWNWVRQAPGQGLEWMGYIYSSGSTSYNPSLKSRVTMTRDTSTNTFYMELSSLRSEDTAVYYCARGNWHYFDFWGQGTMVTVSS

SEQ ID NO: 6129 - protein, 118 aa, synthetic construct
QIQLQESGPGLVKPSQTLSLTCTVSGFSINTGGYHWNWIRQHPGKGLEWIGYIYSSGTTRYNPSLKSLVTISRDTSKNQFSLKLSSVTAADTAVYYCARGNWHYFDYWGQGTLVTVSS

SEQ ID NO: 6130 - protein, 118 aa, synthetic construct
QIQLQESGPGLVKPSETLSLTCTVSGFSINTGGYHWNWIRQPAGKGLEWIGYIYSSGTTRYNPSLKSRVTMSRDTSKNQFSLKLSSVTAADTAVYYCARGNWHYFDYWGQGTLVTVSS

SEQ ID NO: 6131 - protein, 118 aa, synthetic construct
EIQLLESGGGLVQPGGSLRLSCAVSGFSINTGGYHWNWVRQAPGKGLEWVGYIYSSGTTRYNPSLKSRFTISRDTSKNTFYLQMNSLRAEDTAVYYCARGNWHYFDYWGQGTLVTVSS

SEQ ID NO: 6132 - protein, 118 aa, synthetic construct
QIQLVESGGGLVKPGGSLRLSCAVSGFSINTGGYHWNWIRQAPGKGLEWVGYIYSSGTTRYNPSLKSRFTISRDTAKNSFYLQMNSLRAEDTAVYYCARGNWHYFDYWGQGTLVTVSS

SEQ ID NO: 6133 - protein, 118 aa, synthetic construct
QIQLVQSGAEVKKPGASVKVSCKVSGFSINTGGYHWNWVRQAPGQGLEWMGYIYSSGTTRYNPSLKSRVTMTRDTSTNTFYMELSSLRSEDTAVYYCARGNWHYFDYWGQGTLVTVSS

SEQ ID NO: 6134 - protein, 118 aa, synthetic construct
EIQLVQSGAEVKKPGATVKISCKVSGFSINTGGYHWNWVQQAPGKGLEWMGYIYSSGTTRYNPSLKSRVTITRDTSTNTFYMELSSLRSEDTAVYYCARGNWHYFDYWGQGTLVTVSS

SEQ ID NO: 6135 - skipped

SEQ ID NO: 6136 - protein, 107 aa, synthetic construct
SYTLTQPPSLSVAPGQKATIICSGENLSDKYVHWYQQKPGRAPVMVIYENEKRPSGIPDQFSGSNSGNIATLTISKAQPGSEADYYCHYWESINSVVFGSGTHLTVL

SEQ ID NO: 6137 - protein, 107 aa, synthetic construct
QSVTTQPPSVSGAPGQRVTISCSGERLSDKYVHWYQQLPGTAPKMLIYENDKRPSGVPDRFSGSNSGNSASLAITGLQAEDEADYYCQSWDSTNSAVFGGGTQLTVL

SEQ ID NO: 6138 - protein, 107 aa, synthetic construct
QSVTTQPPSASGTPGQRVTISCSGERLSDKYVHWYQQLPGTAPKMLIYENDKRPSGVPDRFSGSNSGNSASLAISGLQSEDEADYYCQSWDSTNSAVFGGGTQLTVL

SEQ ID NO: 6139 - protein, 107 aa, synthetic construct
QSVTTQPPSASGTPGQRVTISCSGERLSDKYVHWYQQLPGTAPKMLIYENDKRPSGVPDRFSGSNSGNSASLAISGLRSEDEADYYCQSWDSTNSAVFGGGTQLTVL

SEQ ID NO: 6140 - protein, 107 aa, synthetic construct
SSETTQPHSVSVATAQMARITCSGERLSDKYVHWYQQKPGQDPVMVIYENDKRPSGIPERFSGSNPGNTATLTISRIEAGDEADYYCQSWDSTNSAVFGGGTQLTVL

SEQ ID NO: 6141 - protein, 108 aa, synthetic construct
DIQMTQSPSTLSASVGDRVTITCSGERLSDKYVHWYQQKPGKAPKMLIYENDKRPSGVPSRFSGSNSGNEATLTISSLQPDDFATYYCQSWDSTNSAVFGQGTKVEIK

SEQ ID NO: 6142 - protein, 107 aa, synthetic construct
QYVLTQPPSASGTPGQRVTISCSGENLSDKYVHWYQQLPGTAPKMLIYENEKRPSGVPDRFSGSNSGNSASLAISGLQSEDEADYYCHYWESINSVVFGEGTELTVL

SEQ ID NO: 6143 - protein, 107 aa, synthetic construct
QYVLTQPPSASGTPGQRVTISCSGENLSDKYVHWYQQLPGTAPKMLIYENEKRPSGVPDRFSGSNSGNSASLAISGLRSEDEADYYCHYWESINSVVFGEGTELTVL

SEQ ID NO: 6144 - protein, 107 aa, synthetic construct
SYELTQPPSVSVSPGQTASITCSGENLSDKYVHWYQQKPGQSPVMVIYENEKRPSGIPERFSGSNSGNTATLTISGTQAMDEADYYCHYWESINSVVFGEGTELTVL

SEQ ID NO: 6145 - protein, 108 aa, synthetic construct
DYVLTQSPLSLPVTPGEPASISCSGENLSDKYVHWYLQKPGQSPQMLIYENEKRPSGVPDRFSGSNSGNDATLKISRVEAEDVGVYYCHYWESINSVVFGQGTKVEIK

SEQ ID NO: 6146 - protein, 108 aa, synthetic construct
AYQLTQSPSSLSASVGDRVTITCSGENLSDKYVHWYQQKPGKAPKMLIYENEKRPSGVPSRFSGSNSGNDATLTISSLQPEDFATYYCHYWESINSVVFGQGTKVEIK

SEQ ID NO: 6147 - protein, 108 aa, synthetic construct
EYVLTQSPATLSVSPGERATLSCSGENLSDKYVHWYQQKPGQAPRMLIYENEKRPSGIPARFSGSNSGNEATLTISSLQSEDFAVYYCHYWESINSVVFGQGTKVEIK

SEQ ID NO: 6148 - protein, 448 aa, synthetic construct
QIQLQESGPGLVKPSQSLSLTCSVTGFSINTGGYHWNWIRQFPGKKLEWMGYIYSSGSTSYNPSLKSRISITRDTSKNQFFLQLNSVTTEDTATYYCARGNWHYFDFWGQGTMVTVSSASTKGPSVFPLAPSSKSTSGGTAALGCLVKDYFPEPVTVSWNSGALTSGVHTFPAVLQSSGLYSLSSVVTVPSSSLGTQTYICNVNHKPSNTKVDKRVEPKSCDKTHTCPPCPAPELLGGPSVFLFPPKPKDTLMISRTPEVTCVVVDVSHEDPEVKFNWYVDGVEVHNAKTKPREEQYASTYRVVSVLTVLHQDWLNGKEYKCKVSNKALPAPIEKTISKAKGQPREPQVCTLPPSREEMTKNQVSLSCAVKGFYPSDIAVEWESNGQPENNYKTTPPVLDSDGSFFLVSKLTVDKSRWQQGNVFSCSVMHEALHNHYTQKSLSLSPGK

SEQ ID NO: 6149 - protein, 448 aa, synthetic construct
QIQLQESGPGLVKPSQSLSLTCSVTGFSINTGGYHWNWIRQFPGKKLEWMGYIYSSGSTSYNPSLKSRISITRDTSKNQFFLQLNSVTTEDTATYYCARGNWHYFDFWGQGTMVTVSSASTKGPSVFPLAPSSKSTSGGTAALGCLVKDYFPEPVTVSWNSGALTSGVHTFPAVLQSSGLYSLSSVVTVPSSSLGTQTYICNVNHKPSNTKVDKRVEPKSCDKTHTCPPCPAPELLGGPSVFLFPPKPKDTLMISRTPEVTCVVVDVSHEDPEVKFNWYVDGVEVHNAKTKPREEQYNSTYRVVSVLTVLHQDWLNGKEYKCKVSNKALPAPIEKTISKAKGQPREPQVCTLPPSREEMTKNQVSLSCAVKGFYPSDIAVEWESNGQPENNYKTTPPVLDSDGSFFLVSKLTVDKSRWQQGNVFSCSVMHEALHNHYTQKSLSLSPGK

SEQ ID NO: 6150 - protein, 213 aa, synthetic construct
SYTLTQPPLLSVALGHKATITCSGERLSDKYVHWYQQKPGRAPVMVIYENDKRPSGIPDQFSGSNSGNIATLTISKAQAGYEADYYCQSWDSTNSAVFGSGTQLTVLGQPKANPTVTLFPPSSEELQANKATLVCLISDFYPGAVTVAWKADGSPVKAGVETTKPSKQSNNKYAASSYLSLTPEQWKSHRSYSCQVTHEGSTVEKTVAPTECS

SEQ ID NO: 6151 - protein, 448 aa, synthetic construct
QIQLQESGPGLVKPSQSLSLTCSVTGFSINTGGYHWNWIRQFPGKKLEWMGYIYSSGTTRYNPSLKSRISITRDTSKNQFFLQLNSVTPEDTATYYCTRGNWHYFDYWGQGTLVAVSSASTKGPSVFPLAPSSKSTSGGTAALGCLVKDYFPEPVTVSWNSGALTSGVHTFPAVLQSSGLYSLSSVVTVPSSSLGTQTYICNVNHKPSNTKVDKRVEPKSCDKTHTCPPCPAPELLGGPSVFLFPPKPKDTLMISRTPEVTCVVVDVSHEDPEVKFNWYVDGVEVHNAKTKPREEQYASTYRVVSVLTVLHQDWLNGKEYKCKVSNKALPAPIEKTISKAKGQPREPQVCTLPPSREEMTKNQVSLSCAVKGFYPSDIAVEWESNGQPENNYKTTPPVLDSDGSFFLVSKLTVDKSRWQQGNVFSCSVMHEALHNHYTQKSLSLSPGK

SEQ ID NO: 6152 - protein, 448 aa, synthetic construct
QIQLQESGPGLVKPSQSLSLTCSVTGFSINTGGYHWNWIRQFPGKKLEWMGYIYSSGTTRYNPSLKSRISITRDTSKNQFFLQLNSVTPEDTATYYCTRGNWHYFDYWGQGTLVAVSSASTKGPSVFPLAPSSKSTSGGTAALGCLVKDYFPEPVTVSWNSGALTSGVHTFPAVLQSSGLYSLSSVVTVPSSSLGTQTYICNVNHKPSNTKVDKRVEPKSCDKTHTCPPCPAPELLGGPSVFLFPPKPKDTLMISRTPEVTCVVVDVSHEDPEVKFNWYVDGVEVHNAKTKPREEQYNSTYRVVSVLTVLHQDWLNGKEYKCKVSNKALPAPIEKTISKAKGQPREPQVCTLPPSREEMTKNQVSLSCAVKGFYPSDIAVEWESNGQPENNYKTTPPVLDSDGSFFLVSKLTVDKSRWQQGNVFSCSVMHEALHNHYTQKSLSLSPGK

SEQ ID NO: 6153 - protein, 213 aa, synthetic construct
SYTLTQPPSLSVAPGQKATIICSGENLSDKYVHWYQQKPGRAPVMVIYENEKRPSGIPDQFSGSNSGNIATLTISKAQPGSEADYYCHYWESINSVVFGSGTHLTVLGQPKANPTVTLFPPSSEELQANKATLVCLISDFYPGAVTVAWKADGSPVKAGVETTKPSKQSNNKYAASSYLSLTPEQWKSHRSYSCQVTHEGSTVEKTVAPTECS

SEQ ID NO: 6154 - protein, 454 aa, synthetic construct
EVRLQQSGPDLIKPGASVKMSCKASGYTFTGYVMHWVKQRPGQGLEWIGFINPYNDDIQSNERFRGKATLTSDKSSTTAYMELSSLTSEDSAVYYCARGAGYNFDGAYRFFDFWGQGTTLTVSSASTKGPSVFPLAPSSKSTSGGTAALGCLVKDYFPEPVTVSWNSGALTSGVHTFPAVLQSSGLYSLSSVVTVPSSSLGTQTYICNVNHKPSNTKVDKRVEPKSCDKTHTCPPCPAPELLGGPSVFLFPPKPKDTLMISRTPEVTCVVVDVSHEDPEVKFNWYVDGVEVHNAKTKPREEQYASTYRVVSVLTVLHQDWLNGKEYKCKVSNKALPAPIEKTISKAKGQPREPQVYTLPPCREEMTKNQVSLWCLVKGFYPSDIAVEWESNGQPENNYKTTPPVLDSDGSFFLYSKLTVDKSRWQQGNVFSCSVMHEALHNHYTQKSLSLSPGK

SEQ ID NO: 6155 - protein, 454 aa, synthetic construct
EVRLQQSGPDLIKPGASVKMSCKASGYTFTGYVMHWVKQRPGQGLEWIGFINPYNDDIQSNERFRGKATLTSDKSSTTAYMELSSLTSEDSAVYYCARGAGYNFDGAYRFFDFWGQGTTLTVSSASTKGPSVFPLAPSSKSTSGGTAALGCLVKDYFPEPVTVSWNSGALTSGVHTFPAVLQSSGLYSLSSVVTVPSSSLGTQTYICNVNHKPSNTKVDKRVEPKSCDKTHTCPPCPAPELLGGPSVFLFPPKPKDTLMISRTPEVTCVVVDVSHEDPEVKFNWYVDGVEVHNAKTKPREEQYNSTYRVVSVLTVLHQDWLNGKEYKCKVSNKALPAPIEKTISKAKGQPREPQVYTLPPCREEMTKNQVSLWCLVKGFYPSDIAVEWESNGQPENNYKTTPPVLDSDGSFFLYSKLTVDKSRWQQGNVFSCSVMHEALHNHYTQKSLSLSPGK

SEQ ID NO: 6156 - protein, 219 aa, synthetic construct
DVVMTQSPLSLPVSLGDQASISCRSSQRLVHSNGNTYLHWYLQKPGQSPKLLIYRVSNRFPGVPDRFSGSGSGTDFTLKISRVEAEDLGIYFCSQSTHVPYTFGGGTKLEIKRTVAAPSVFIFPPSDEQLKSGTASVVCLLNNFYPREAKVQWKVDNALQSGNSQESVTEQDSKDSTYSLSSTLTLSKADYEKHKVYACEVTHQGLSSPVTKSFNRGEC

SEQ ID NO: 6157-6166 - skipped (10 entries)

SEQ ID NO: 6167 - protein, 474 aa, synthetic construct
METDTLLLWVLLLWVPGSTGQVQLVQSGAEVKKPGSSVKVSCKASGYTFTGYVMHWVRQAPGQGLEWMGFINPYNDDIQSNERFRGRVTITSDKSTTTAYMELSSLRSEDTAVYYCARGAGYNFDGAYRFFDFWGQGTLVTVSSASTKGPSVFPLAPSSKSTSGGTAALGCLVKDYFPEPVTVSWNSGALTSGVHTFPAVLQSSGLYSLSSVVTVPSSSLGTQTYICNVNHKPSNTKVDKRVEPKSCDKTHTCPPCPAPELLGGPSVFLFPPKPKDTLMISRTPEVTCVVVDVSHEDPEVKFNWYVDGVEVHNAKTKPREEQYNSTYRVVSVLTVLHQDWLNGKEYKCKVSNKALPAPIEKTISKAKGQPREPQVCTLPPSREEMTKNQVSLSCAVKGFYPSDIAVEWESNGQPENNYKTTPPVLDSDGSFFLVSKLTVDKSRWQQGNVFSCSVMHEALHNHYTQKSLSLSPGK

SEQ ID NO: 6168 - protein, 474 aa, synthetic construct
METDTLLLWVLLLWVPGSTGQVQLVQSGAEVKKPGSSVKVSCKASGYTFTGYVMHWVRQAPGQGLEWMGFINPYNDDIQSNERFRGRVTITSDKSTTTAYMELSSLRSEDTAVYYCARGAGYNFDGAYRFFDFWGQGTLVTVSSASTKGPSVFPLAPSSKSTSGGTAALGCLVKDYFPEPVTVSWNSGALTSGVHTFPAVLQSSGLYSLSSVVTVPSSSLGTQTYICNVNHKPSNTKVDKRVEPKSCDKTHTCPPCPAPELLGGPSVFLFPPKPKDTLMISRTPEVTCVVVDVSHEDPEVKFNWYVDGVEVHNAKTKPREEQYNSTYRVVSVLTVLHQDWLNGKEYKCKVSNKALPAPIEKTISKAKGQPREPQVYTLPPSREEMTKNQVSLTCLVKGFYPSDIAVEWESNGQPENNYKTTPPVLDSDGSFFLYSKLTVDKSRWQQGNVFSCSVMHEALHNHYTQKSLSLSPGK

SEQ ID NO: 6169 - protein, 239 aa, synthetic construct
METDTLLLWVLLLWVPGSTGDVVMTQSPLSLPVTLGQPASISCRSSQRLVHSNGNTYLHWYQQRPGQSPRLLIYRVSNRFPGVPDRFSGSGSGTDFTLKISRVEAEDVGVYFCSQSTHVPYTFGGGTKVEIKRTVAAPSVFIFPPSDEQLKSGTASVVCLLNNFYPREAKVQWKVDNALQSGNSQESVTEQDSKDSTYSLSSTLTLSKADYEKHKVYACEVTHQGLSSPVTKSFNRGEC

SEQ ID NO: 6170-6172 - skipped (3 entries)

SEQ ID NO: 6173 - protein, 597 aa, synthetic construct
METDTLLLWVLLLWVPGSTGQVQLVQSGAEVKKPGSSVKVSCKASGYTFTGYVMHWVRQAPGQGLEWMGFINPYNDDIQSNERFRGRVTITSDKSTTTAYMELSSLRSEDTAVYYCARGAGYNFDGAYRFFDFWGQGTLVTVSSGSASAPTLFPLVSCENSPSDTSSVAVGCLAQDFLPDSITFSWKYKNNSDISSTRGFPSVLRGGKYAATSQVLLPSKDVMQGTDEHVVCKVQHPNGNKEKNVPLPVIAELPPKVSVFVPPRDGFFGNPRKSKLICQATGFSPRQIQVSWLREGKQVGSGVTTDQVQAEAKESGPTTYKVTSTLTIKESDWLGQSMFTCRVDHRGLTFQQNASSMCVPDQDTAIRVFAIPPSFASIFLTKSTKLTCLVTDLTTYDSVTISWTRQNGEAVKTHTNISESHPNATFSAVGEASICEDDWNSGERFTCTVTHTDLPSPLKQTISRPKGVALHRPDVYLLPPAREQLNLRESATITCLVTGFSPADVFVQWMQRGQPLSPEKYVTSAPMPEPQAPGRYFAHSILTVSEEEWNTGETYTCVVAHEALPNRVTERTVDKSTGKPTLYNVSLVMSDTAGTCY

SEQ ID NO: 6174 - protein, 159 aa, synthetic construct; identical to SEQ ID NO: 76

SEQ ID NO: 6175 - protein, 243 aa, synthetic construct
QVHLQESGPGLVKPSETLSLTCTVSDDSISSYYWSWIRQPPGKGLEWIGHISYSGSANYNPSLKSRVTISVDTSKNQFSLKLSSVTAADTAVYYCANWDDAFNIWGQGTMVTVSSGGGGSGGGGSGGGGSGGGGSEIVLTQSPGTLSLSPGERATLSCRASQSVSSSYLAWYQQKPGQAPRLLIYGASSRATGIPDRFSGSGSGTDFTLTISRLEPEDFAVYYCQQYGSSPWTFGQGTKVEIK

SEQ ID NO: 6176 - protein, 115 aa, synthetic construct
QVHLQESGPGLVKPSETLSLTCTVSDDSISSYYWSWIRQPPGKGLEWIGHISYSGSANYNPSLKSRVTISVDTSKNQFSLKLSSVTAADTAVYYCANWDDAFNIWGQGTMVTVSS

SEQ ID NO: 6177 - protein, 108 aa, synthetic construct
EIVLTQSPGTLSLSPGERATLSCRASQSVSSSYLAWYQQKPGQAPRLLIYGASSRATGIPDRFSGSGSGTDFTLTISRLEPEDFAVYYCQQYGSSPWTFGQGTKVEIK

SEQ ID NO: 6178 - protein, 250 aa, synthetic construct
EVQLVQSGAEVKEPGESLKISCKNSGYSFTNYWVGWVRQMPGKGLEWMGIIYPGDSDTRYSPSFQGQVTISADKSINTAYLQWSSLKASDTAMYYCGRLTMFRGIIIGYFDYWGQGTLVTVSSGGGGSGGGGSGGGGSGGGGSEIVLTQSPATLSLSPGERATLSCRASQSVSSYLAWYQQKPGQAPRLLIYDASNRATGIPARFSGSGSGTDFTLTISSLEPEDFAVYYCQQRSNWPWTFGQGTKVEIK

SEQ ID NO: 6179 - protein, 123 aa, synthetic construct
EVQLVQSGAEVKEPGESLKISCKNSGYSFTNYWVGWVRQMPGKGLEWMGIIYPGDSDTRYSPSFQGQVTISADKSINTAYLQWSSLKASDTAMYYCGRLTMFRGIIIGYFDYWGQGTLVTVSS

SEQ ID NO: 6180 - protein, 107 aa, synthetic construct
EIVLTQSPATLSLSPGERATLSCRASQSVSSYLAWYQQKPGQAPRLLIYDASNRATGIPARFSGSGSGTDFTLTISSLEPEDFAVYYCQQRSNWPWTFGQGTKVEIK

SEQ ID NO: 6181 - protein, 247 aa, synthetic construct
QVQLQQSGPELVKPGASVKMSCKASGYTFTDYVINWGKQRSGQGLEWIGEIYPGSGTNYYNEKFKAKATLTADKSSNIAYMQLSSLTSEDSAVYFCARRGRYGLYAMDYWGQGTSVTVSSGGGGSGGGGSGGGGSGGGGSDIQMTQTTSSLSASLGDRVTISCRASQDISNYLNWYQQKPDGTVKLLIYYTSRLHSGVPSRFSGSGSGTDYSLTINNLEQEDIATYFCQQGNTRPWTFGGGTKLEIK

SEQ ID NO: 6182 - protein, 120 aa, synthetic construct
QVQLQQSGPELVKPGASVKMSCKASGYTFTDYVINWGKQRSGQGLEWIGEIYPGSGTNYYNEKFKAKATLTADKSSNIAYMQLSSLTSEDSAVYFCARRGRYGLYAMDYWGQGTSVTVSS

SEQ ID NO: 6183 - protein, 107 aa, synthetic construct
DIQMTQTTSSLSASLGDRVTISCRASQDISNYLNWYQQKPDGTVKLLIYYTSRLHSGVPSRFSGSGSGTDYSLTINNLEQEDIATYFCQQGNTRPWTFGGGTKLEIK

SEQ ID NO: 6184 - protein, 239 aa, synthetic construct
EVQLVESGGGVVRPGGSLRLSCAASGFTFDDYGMSWVRQAPGKGLEWVSGINWNGGSTGYADSVKGRFTISRDNAKNSLYLQMNSLRAEDTAVYYCARGRSLLFDYWGQGTLVTVSRGGGGSGGGGSGGGGSSELTQDPAVSVALGQTVRITCQGDSLRSYYASWYQQKPGQAPVLVIYGKNNRPSGIPDRFSGSSSGNTASLTITGAQAEDEADYYCNSRDSSGNHVVFGGGTKLTVL

SEQ ID NO: 6185 - protein, 117 aa, synthetic construct
EVQLVESGGGVVRPGGSLRLSCAASGFTFDDYGMSWVRQAPGKGLEWVSGINWNGGSTGYADSVKGRFTISRDNAKNSLYLQMNSLRAEDTAVYYCARGRSLLFDYWGQGTLVTVSR

SEQ ID NO: 6186 - protein, 108 aa, synthetic construct
SSELTQDPAVSVALGQTVRITCQGDSLRSYYASWYQQKPGQAPVLVIYGKNNRPSGIPDRFSGSSSGNTASLTITGAQAEDEADYYCNSRDSSGNHVVFGGGTKLTVL

SEQ ID NO: 6187 - protein, 245 aa, synthetic construct
QIQLQESGPGLVKPSQSLSLTCSVTGFSINTGGYHWNWIRQFPGKKLEWMGYIYSSGSTSYNPSLKSRISITRDTSKNQFFLQLNSVTTEDTATYYCARGNWHYFDFWGQGTMVTVSSGGGGSGGGGSGGGGSGGGGSSYTLTQPPLLSVALGHKATITCSGERLSDKYVHWYQQKPGRAPVMVIYENDKRPSGIPDQFSGSNSGNIATLTISKAQAGYEADYYCQSWDSTNSAVFGSGTQLTVL

SEQ ID NO: 6188 - protein, 245 aa, synthetic construct
SYTLTQPPLLSVALGHKATITCSGERLSDKYVHWYQQKPGRAPVMVIYENDKRPSGIPDQFSGSNSGNIATLTISKAQAGYEADYYCQSWDSTNSAVFGSGTQLTVLGGGGSGGGGSGGGGSGGGGSQIQLQESGPGLVKPSQSLSLTCSVTGFSINTGGYHWNWIRQFPGKKLEWMGYIYSSGSTSYNPSLKSRISITRDTSKNQFFLQLNSVTTEDTATYYCARGNWHYFDFWGQGTMVTVSS

SEQ ID NO: 6189 - protein, 245 aa, synthetic construct
QIQLQESGPGLVKPSQSLSLTCSVTGFSINTGGYHWNWIRQFPGKKLEWMGYIYSSGTTRYNPSLKSRISITRDTSKNQFFLQLNSVTPEDTATYYCTRGNWHYFDYWGQGTLVAVSSGGGGSGGGGSGGGGSGGGGSSYTLTQPPSLSVAPGQKATIICSGENLSDKYVHWYQQKPGRAPVMVIYENEKRPSGIPDQFSGSNSGNIATLTISKAQPGSEADYYCHYWESINSVVFGSGTHLTVL

SEQ ID NO: 6190 - protein, 245 aa, synthetic construct
SYTLTQPPSLSVAPGQKATIICSGENLSDKYVHWYQQKPGRAPVMVIYENEKRPSGIPDQFSGSNSGNIATLTISKAQPGSEADYYCHYWESINSVVFGSGTHLTVLGGGGSGGGGSGGGGSGGGGSQIQLQESGPGLVKPSQSLSLTCSVTGFSINTGGYHWNWIRQFPGKKLEWMGYIYSSGTTRYNPSLKSRISITRDTSKNQFFLQLNSVTPEDTATYYCTRGNWHYFDYWGQGTLVAVSS

SEQ ID NO: 6191 - protein, 227 aa, synthetic construct
EVRLQQSGPDLIKPGASVKMSCKASGYTFTGYVMHWVKQRPGQGLEWIGFINPYNDDIQSNERFRGKATLTSDKSSTTAYMELSSLTSEDSAVYYCARGAGYNFDGAYRFFDFWGQGTTLTVSSASTKGPSVFPLAPSSKSTSGGTAALGCLVKDYFPEPVTVSWNSGALTSGVHTFPAVLQSSGLYSLSSVVTVPSSSLGTQTYICNVNHKPSNTKVDKRVEPKSC

SEQ ID NO: 6192-7232 - skipped (1041 entries)

SEQ ID NO: 7233 - protein, 238 aa, synthetic construct
DLKVEMMAGGTQITPLNDNVTIFCNIFYSQPLNITSMGITWFWKSLTFDKEVKVFEFFGDHQEAFRPGAIVSPWRLKSGDASLRLPGIQLEEAGEYRCEVVVTPLKAQGTVQLEVVASPASRLLLDQVGMKENEDKYMCESSGFYPEAINITWEKQTQKFPHPIEISEDVITGPTIKNMDGTFNVTSCLKLNSSQEDPGTVYQCVVRHASLHTPLRSNFTLTAARHSLSETEKTDNFS

SEQ ID NO: 7234 - protein, 284 aa, synthetic construct
EPHSLRYNLTVLSWDGSVQSGFLTEVHLDGQPFLRCDRQKCRAKPQGQWAEDVLGNKTWDRETRDLTGNGKDLRMTLAHIKDQKEGLHSLQEIRVCEIHEDNSTRSSQHFYYDGELFLSQNLETKEWTMPQSSRAQTLAMNVRNFLKEDAMKTKTHYHAMHADCLQELRRYLKSGVVLRRTVPPMVNVTRSEASEGNITVTCRASGFYPWNITLSWRQDGVSLSHDTQQWGDVLPDGNGTYQTWVATRICQGEEQRFTCYMEHSGNHSTHPVPSGKVLVLQSHW

SEQ ID NO: 7235 - protein, 287 aa, synthetic construct
AEPHSLRYNLMVLSQDESVQSGFLAEGHLDGQPFLRYDRQKRRAKPQGQWAEDVLGAKTWDTETEDLTENGQDLRRTLTHIKDQKGGLHSLQEIRVCEIHEDSSTRGSRHFYYDGELFLSQNLETQESTVPQSSRAQTLAMNVTNFWKEDAMKTKTHYRAMQADCLQKLQRYLKSGVAIRRTVPPMVNVTCSEVSEGNITVTCRASSFYPRNITLTWRQDGVSLSHNTQQWGDVLPDGNGTYQTWVATRIRQGEEQRFTCYMEHSGNHGTHPVPSGKVLVLQSQRTD

SEQ ID NO: 7236 - protein, 191 aa, synthetic construct
GWVDTHCLCYDFIITPKSRPEPQWCEVQGLVDERPFLHYDCVNHKAKAFASLGKKVNVTKTWEEQTETLRDVVDFLKGQLLDIQVENLIPIEPLTLQARMSCEHEAHGHGRGSWQFLFNGQKFLLFDSNNRKWTALHPGAKKMTEKWEKNRDVTMFFQKISLGDCKMWLEEFLMYWEQMLDPTKPPSLAPG

SEQ ID NO: 7237 - protein, 329 aa, synthetic construct
QDVRVQVLPEVRGQLGGTVELPCHLLPPVPGLYISLVTWQRPDAPANHQNVAAFHPKMGPSFPSPKPGSERLSFVSAKQSTGQDTEAELQDATLALHGLTVEDEGNYTCEFATFPKGSVRGMTWLRVIAKPKNQAEAQKVTFSQDPTTVALCISKEGRPPARISWLSSLDWEAKETQVSGTLAGTVTVTSRFTLVPSGRADGVTVTCKVEHESFEEPALIPVTLSVRYPPEVSISGYDDNWYLGRTDATLSCDVRSNPEPTGYDWSTTSGTFPTSAVAQGSQLVIHAVDSLFNTTFVCTVTNAVGMGRAEQVIFVRETPNTAGAGATGG

SEQ ID NO: 7238 - protein, 323 aa, synthetic construct
WPPPGTGDVVVQAPTQVPGFLGDSVTLPCYLQVPNMEVTHVSQLTWARHGESGSMAVFHQTQGPSYSESKRLEFVAARLGAELRNASLRMFGLRVEDEGNYTCLFVTFPQGSRSVDIWLRVLAKPQNTAEVQKVQLTGEPVPMARCVSTGGRPPAQITWHSDLGGMPNTSQVPGFLSGTVTVTSLWILVPSSQVDGKNVTCKVEHESFEKPQLLTVNLTVYYPPEVSISGYDNNWYLGQNEATLTCDARSNPEPTGYNWSTTMGPLPPFAVAQGAQLLIRPVDKPINTTLICNVTNALGARQAELTVQVKEGPPSEHSGISRN

SEQ ID NO: 7239 - protein, 330 aa, synthetic construct
QNLFTKDVTVIEGEVATISCQVNKSDDSVIQLLNPNRQTIYFRDFRPLKDSRFQLLNFSSSELKVSLTNVSISDEGRYFCQLYTDPPQESYTTITVLVPPRNLMIDIQKDTAVEGEEIEVNCTAMASKPATTIRWFKGNTELKGKSEVEEWSDMYTVTSQLMLKVHKEDDGVPVICQVEHPAVTGNLQTQRYLEVQYKPQVHIQMTYPLQGLTREGDALELTCEAIGKPQPVMVTWVRVDDEMPQHAVLSGPNLFINNLNKTDNGTYRCEASNIVGKAHSDYMLYVYDPPTTIPPPTTTTTTTTTTTTTILTIITDSRAGEEGSIRAVDH

SEQ ID NO: 7240 - protein, 155 aa, synthetic construct
QRFAQAQQQLPLESLGWDVAELQLNHTGPQQDPRLYWQGGPALGRSFLHGPELDKGQLRIHRDGIYMVHIQVTLAICSSTTASRHHPTTLAVGICSPASRSISLLRLSFHQGCTIASQRLTPLARGDTLCTNLTGTLLPSRNTDETFFGVQWVRP

SEQ ID NO: 7241 - protein, 294 aa, synthetic construct
WTYHYSEKPMNWQRARRFCRDNYTDLVAIQNKAEIEYLEKTLPFSRSYYWIGIRKIGGIWTWVGTNKSLTEEAENWGDGEPNNKKNKEDCVEIYIKRNKDAGKWNDDACHKLKAALCYTASCQPWSCSGHGECVEIINNYTCNCDVGYYGPQCQFVIQCEPLEAPELGTMDCTHPLGNFSFSSQCAFSCSEGTNLTGIEETTCGPFGNWSSPEPTCQVIQCEPLSAPDLGIMNCSHPLASFSFTSACTFICSEGTELIGKKKTICESSGIWSNPSPICQKLDKSFSMIKEGDYN

SEQ ID NO: 7242 - protein, 243 aa, synthetic construct
RYLQVSQQLQQTNRVLEVTNSSLRQQLRLKITQLGQSAEDLQGSRRELAQSQEALQVEQRAHQAAEGQLQACQADRQKTKETLQSEEQQRRALEQKLSNMENRLKPFFTCGSADTCCPSGWIMHQKSCFYISLTSKNWQESQKQCETLSSKLATFSEIYPQSHSYYFLNSLLPNGGSGNSYWTGLSSNKDWKLTDDTQRTRTYAQSSKCNKVHKTWSWWTLESESCRSSLPYICEMTAFRFPD

SEQ ID NO: 7243 - protein, 124 aa, synthetic construct
KLTRDSQSLCPYDWIGFQNKCYYFSKEEGDWNSSKYNCSTQHADLTIIDNIEEMNFLRRYKCSSDHWIGLKMAKNRTGQWVDGATFTKSFGMRGSEGCAYLSDDGAATARCYTERKWICRKRIH

SEQ ID NO: 7244 - protein, 194 aa, synthetic construct
QGHLVHMTVVSGSNVTLNISESLPENYKQLTWFYTFDQKIVEWDSRKSKYFESKFKGRVRLDPQSGALYISKVQKEDNSTYIMRVLKKTGNEQEWKIKLQVLDPVPKPVIKIEKIEDMDDNCYLKLSCVIPGESVNYTWYGDKRPFPKELQNSVLETTLMPHNYSRCYTCQVSNSVSSKNGTVCLSPPCTLARS

SEQ ID NO: 7245 - protein, 133 aa, synthetic construct
QVSHRYPRIQSIKVQFTEYKKEKGFILTSQKEDEIMKVQNNSVIINCDGFYLISLKGYFSQEVNISLHYQKDEEPLFQLKKVRSVNSLMVASLTYKDKVYLNVTTDNTSLDDFHVNGGELILIHQNPGEFCVL

SEQ ID NO: 7246 - protein, 149 aa, synthetic construct
MQKGDQNPQIAAHVISEASSKTTSVLQWAEKGYYTMSNNLVTLENGKQLTVKRQGLYYIYAQVTFCSNREASSQAPFIASLCLKSPGRFERILLRAANTHSSAKPCGQQSIHLGGVFELQPGASVFVNVTDPSQVSHGTGFTSFGLLKL

SEQ ID NO: 7247 - protein, 205 aa, synthetic construct
ACPWAVSGARASPGSAASPRLREGPELSPDDPAGLLDLRQGMFAQLVAQNVLLIDGPLSWYSDPGLAGVSLTGGLSYKEDTKELVVAKAGVYYVFFQLELRRVVAGEGSGSVSLALHLQPLRSAAGAAALALTVDLPPASSEARNSAFGFQGRLLHLSAGQRLGVHLHTEARARHAWQLTQGATVLGLFRVTPEIPAGLPSPRSE

SEQ ID NO: 7248 - protein, 455 aa, synthetic construct
LNFRAPPVIPNVPFLWAWNAPSEFCLGKFDEPLDMSLFSFIGSPRINATGQGVTIFYVDRLGYYPYIDSITGVTVNGGIPQKISLQDHLDKAKKDITFYMPVDNLGMAVIDWEEWRPTWARNWKPKDVYKNRSIELVQQQNVQLSLTEATEKAKQEFEKAGKDFLVETIKLGKLLRPNHLWGYYLFPDCYNHHYKKPGYNGSCFNVEIKRNDDLSWLWNESTALYPSIYLNTQQSPVAATLYVRNRVREAIRVSKIPDAKSPLPVFAYTRIVFTDQVLKFLSQDELVYTFGETVALGASGIVIWGTLSIMRSMKSCLLLDNYMETILNPYIINVTLAAKMCSQVLCQEQGVCIRKNWNSSDYLHLNPDNFAIQLEKGGKFTVRGKPTLEDLEQFSEKFYCSCYSTLSCKEKADVKDTDAVDVCIADGVCIDAFLKPPMETEEPQIFYNASPSTLS

SEQ ID NO: 7249 - protein, 5 aa, synthetic construct
GGGGS

SEQ ID NO: 7250 - protein, 10 aa, synthetic construct
GGGGSGGGGS

SEQ ID NO: 7251 - protein, 15 aa, synthetic construct
GGGGSGGGGSGGGGS

SEQ ID NO: 7252 - protein, 17 aa, synthetic construct
DVPSGPGGGGGSGGGGS

SEQ ID NO: 7253 - protein, 413 aa, Homo sapiens
FRGPLLPNRPFTTVWNANTQWCLERHGVDVDVSVFDVVANPGQTFRGPDMTIFYSSQGTYPYYTPTGEPVFGGLPQNASLIAHLARTFQDILAAIPAPDFSGLAVIDWEAWRPRWAFNWDTKDIYRQRSRALVQAQHPDWPAPQVEAVAQDQFQGAARAWMAGTLQLGRALRPRGLWGFYGFPDCYNYDFLSPNYTGQCPSGIRAQNDQLGWLWGQSRALYPSIYMPAVLEGTGKSQMYVQHRVAEAFRVAVAAGDPNLPVLPYVQIFYDTTNHFLPLDELEHSLGESAAQGAAGVVLWVSWENTRTKESCQAIKEYMDTTLGPFILNVTSGALLCSQALCSGHGRCVRRTSHPKALLLLNPASFSIQLTPGGGPLSLRGALSLEDQAQMAVEFKCRCYPGWQAPWCERKSMW

SEQ ID NO: 7254 - protein, 551 aa, unidentified
  source 1..551: note = collagenase sequence
YNFFPRKPKWDKNQITYRIIGYTPDLDPETVDDAFARAFQVWSDVTPLRFSRIHDGEADIMINFGRWEHGDGYPFDGKDGLLAHAFAPGTGVGGDSHFDDDELWTLGEGQVVRVKYGNADGEYCKFPFLFNGKEYNSCTDTGRSDGFLWCSTTYNFEKDGKYGFCPHEALFTMGGNAEGQPCKFPFRFQGTSYDSCTTEGRTDGYRWCGTTEDYDRDKKYGFCPETAMSTVGGNSEGAPCVFPFTFLGNKYESCTSAGRSDGKMWCATTANYDDDRKWGFCPDQGYSLFLVAAHEFGHAMGLEHSQDPGALMAPIYTYTKNFRLSQDDIKGIQELYGASPDIDLGTGPTPTLGPVTPEICKQDIVFDGIAQIRGEIFFFKDRFIWRTVTPRDKPMGPLLVATFWPELPEKIDAVYEAPQEEKAVFFAGNEYWIYSASTLERGYPKPLTSLGLPPDVQRVDAAFNWSKNKKTYIFAGDKFWRYNEVKKKMDPGFPKLIADAWNAIPDNLDAVVDLQGGGHSYFFKGAYYLKLENQSLKSVKFGSIKSDWLGC

SEQ ID NO: 7255 - protein, 27 aa, synthetic construct
  VARIANT 12..26: note = EAAAK repeats may be deleted
AEAAAKEAAAKEAAAKEAAAKEAAAKA

SEQ ID NO: 7256 - protein, 455 aa, unidentified; identical to SEQ ID NO: 7248
  source 1..455: note = hyaluronidase sequence

SEQ ID NO: 7257-7291 - skipped (35 entries)

SEQ ID NO: 7292 - protein, 32 aa, synthetic construct
GIPDQFSGSNSGNIATLTISKAQAGYEADYYC

SEQ ID NO: 7293 - protein, 10 aa, synthetic construct
QSWDSTNSAV

SEQ ID NO: 7294 - protein, 107 aa, synthetic construct
SYTLTQPPLLSVALGHKATITCSGERLSDKYVHWYQQKPGRAPVMVIYENDKRPSGIPDQFSGSNSGNIATLTISKAQAGYEADYYCQSWDSTNSAVFGSGTQLTVL

SEQ ID NO: 7295 - protein, 118 aa, synthetic construct
QIQLQESGPGLVKPSQSLSLSCSVTGFSINTGGYHWNWIRQFPGKKVEWMGYIYSSGTTKYNPSLKSRISITRDTSKNQFFLQLNSVTTEDTATYYCARGDWHYFDYWGQGTMVAVSS

SEQ ID NO: 7296 - protein, 107 aa, synthetic construct
SYTLTQPPLVSVALGQKATIICSGENLSDKYVHWYQQKPGRAPVMVIYENDKRPSGIPDQFSGSNSGNIATLTISKAQAGYEADYYCHCWDSTNSAVFGSGTHLTVL

SEQ ID NO: 7297 - protein, 118 aa, synthetic construct
QIQLQESGPGLVKPSQSLSLTCSVTGFSINTGGYHWNWIRQFPGKKLEWMGYIYSSGSTRYNPSLKSRFSITRDTSKNQFFLQLNSVTTEDTATYYCTRGNWHYFDYWGQGTLVAVSS

SEQ ID NO: 7298 - protein, 118 aa, synthetic construct
QIQLQESGPGLVKPSQSLSLSCSVTGFSITTTGYHWNWIRQFPGKKLEWMGYIYSSGSTSYNPSLKSRFSITRDTSKNQFFLQLNSVTTEDTATYYCARGDWHYFDYWGPGTMVTVSS

SEQ ID NO: 7299 - protein, 107 aa, synthetic construct
SFTLTQPPLVSVAVGQVATITCSGEKLSDKYVHWYQQKPGRAPVMVIYENDRRPSGIPDQFSGSNSGNIASLTISKAQAGDEADYFCQFWDSTNSAVFGGGTQLTVL

SEQ ID NO: 7300 - protein, 118 aa, synthetic construct
QIQLQESGPGLVKPSQTLSLTCTVSGFSITTTGYHWNWIRQHPGKGLEWIGYIYSSGSTSYNPSLKSLVTISRDTSKNQFSLKLSSVTAADTAVYYCARGDWHYFDYWGQGTMVTVSS

SEQ ID NO: 7301 - protein, 118 aa, synthetic construct
QIQLVESGGGLVKPGGSLRLSCAVSGFSITTTGYHWNWIRQAPGKGLEWVGYIYSSGSTSYNPSLKSRFTISRDTAKNSFYLQMNSLRAEDTAVYYCARGDWHYFDYWGQGTMVTVSS

SEQ ID NO: 7302 - protein, 118 aa, synthetic construct
EIQLLESGGGLVQPGGSLRLSCAVSGFSITTTGYHWNWVRQAPGKGLEWVGYIYSSGSTSYAPSLKSRFTISRDTSKNTFYLQMNSLRAEDTAVYYCARGDWHYFDYWGQGTMVTVSS

SEQ ID NO: 7303 - protein, 118 aa, synthetic construct
EIQLVESGGGLVQPGGSLRLSCAVSGFSITTTGYHWNWVRQAPGKGLEWVGYIYSSGSTSYNPSLKSRFTISRDTAKNSFYLQMNSLRAEDTAVYYCARGDWHYFDYWGQGTMVTVSS

SEQ ID NO: 7304 - protein, 118 aa, synthetic construct
QIQLVQSGAEVKKPGASVKVSCKVSGFSITTTGYHWNWVRQAPGQGLEWMGYIYSSGSTSYNPSLKSRVTMTRDTSTNTFYMELSSLRSEDTAVYYCARGDWHYFDYWGQGTMVTVSS

SEQ ID NO: 7305 - protein, 107 aa, synthetic construct
SSETTQPPSVSVSPGQTASITCSGEKLSDKYVHWYQQKPGQSPVMVIYENDRRPSGIPERFSGSNSGNTATLTISGTQAMDEADYFCQFWDSTNSAVFGGGTQLTVL

SEQ ID NO: 7306 - protein, 107 aa, synthetic construct
SSETTQPHSVSVATAQMARITCSGEKLSDKYVHWYQQKPGQDPVMVIYENDRRPSGIPERFSGSNPGNTATLTISRIEAGDEADYFCQFWDSTNSAVFGGGTQLTVL

SEQ ID NO: 7307 - protein, 107 aa, synthetic construct
QSVTTQPPSASGTPGQRVTISCSGEKLSDKYVHWYQQLPGTAPKMLIYENDRRPSGVPDRFSGSNSGNSASLAISGLRSEDEADYFCQFWDSTNSAVFGGGTQLTVL

SEQ ID NO: 7308 - protein, 107 aa, synthetic construct
QSVTTQPPSVSGAPGQRVTISCSGEKLSDKYVHWYQQLPGTAPKMLIYENDRRPSGVPDRFSGSNSGNSASLAITGLQAEDEADYFCQFWDSTNSAVFGGGTQLTVL

SEQ ID NO: 7309 - skipped

SEQ ID NO: 7310 - protein, 245 aa, synthetic construct
EIQLLESGGGLVQPGGSLRLSCAVSGFSITTTGYHWNWVRQAPGKGLEWVGYIYSSGSTSYNPSLKSRFTISRDTSKNTFYLQMNSLRAEDTAVYYCARGDWHYFDYWGQGTMVTVSSGGGGSGGGGSGGGGSGGGGSSSETTQPPSVSVSPGQTASITCSGEKLSDKYVHWYQQKPGQSPVMVIYENDRRPSGIPERFSGSNSGNTATLTISGTQAMDEADYFCQFWDSTNSAVFGGGTQLTVL

SEQ ID NO: 7311 - protein, 246 aa, synthetic construct
EIQLLESGGGLVQPGGSLRLSCAVSGFSITTTGYHWNWVRQAPGKGLEWVGYIYSSGSTSYNPSLKSRFTISRDTSKNTFYLQMNSLRAEDTAVYYCARGDWHYFDYWGQGTMVTVSSGGGGSGGGGSGGGGSGGGGSDSVTTQSPLSLPVTLGQPASISCSGEKLSDKYVHWYQQRPGQSPRMLIYENDRRPSGVPDRFSGSNSGNDATLKISRVEAEDVGVYFCQFWDSTNSAVFGGGTKVEIK

SEQ ID NO: 7312 - protein, 32 aa, synthetic construct
QIQLQESGPGLVKPSQSLSLSCSVTGFSINTG

SEQ ID NO: 7313 - protein, 5 aa, synthetic construct
GYHWN

SEQ ID NO: 7314 - protein, 14 aa, synthetic construct
WIRQFPGKKVEWMG

SEQ ID NO: 7315 - skipped

SEQ ID NO: 7316 - protein, 11 aa, synthetic construct
WGQGTMVAVSS

SEQ ID NO: 7317 - protein, 32 aa, synthetic construct; identical to SEQ ID NO: 6003

SEQ ID NO: 7318 - protein, 16 aa, synthetic construct
YIYSSGSTRYNPSLKS

SEQ ID NO: 7319 - protein, 32 aa, synthetic construct
RFSITRDTSKNQFFLQLNSVTTEDTATYYCTR

SEQ ID NO: 7320 - protein, 22 aa, synthetic construct
SYTLTQPPLVSVALGQKATIIC

SEQ ID NO: 7321 - protein, 10 aa, synthetic construct
HCWDSTNSAV

SEQ ID NO: 7322 - protein, 32 aa, synthetic construct
QIQLQESGPGLVKPSQSLSLSCSVTGFSITTT

SEQ ID NO: 7323 - protein, 32 aa, synthetic construct
RFSITRDTSKNQFFLQLNSVTTEDTATYYCAR

SEQ ID NO: 7324 - protein, 11 aa, synthetic construct
WGPGTMVTVSS

SEQ ID NO: 7325 - protein, 22 aa, synthetic construct
SFTLTQPPLVSVAVGQVATITC

SEQ ID NO: 7326-7327 - skipped (2 entries)

SEQ ID NO: 7328 - protein, 32 aa, synthetic construct
GIPDQFSGSNSGNIASLTISKAQAGDEADYFC

SEQ ID NO: 7329 - skipped

SEQ ID NO: 7330 - protein, 32 aa, synthetic construct
QIQLQESGPGLVKPSQTLSLTCTVSGFSITTT

SEQ ID NO: 7331 - protein, 32 aa, synthetic construct
QIQLVESGGGLVKPGGSLRLSCAVSGFSITTT

SEQ ID NO: 7332 - protein, 32 aa, synthetic construct
EIQLLESGGGLVQPGGSLRLSCAVSGFSITTT

SEQ ID NO: 7333 - protein, 32 aa, synthetic construct
EIQLVESGGGLVQPGGSLRLSCAVSGFSITTT

SEQ ID NO: 7334 - protein, 32 aa, synthetic construct
QIQLVQSGAEVKKPGASVKVSCKVSGFSITTT

SEQ ID NO: 7335 - protein, 22 aa, synthetic construct
SSETTQPPSVSVSPGQTASITC

SEQ ID NO: 7336 - protein, 32 aa, synthetic construct
GIPERFSGSNSGNTATLTISGTQAMDEADYFC

SEQ ID NO: 7337 - protein, 32 aa, synthetic construct
GIPERFSGSNPGNTATLTISRIEAGDEADYFC

SEQ ID NO: 7338 - protein, 32 aa, synthetic construct
GVPDRFSGSNSGNSASLAISGLRSEDEADYFC

SEQ ID NO: 7339 - protein, 32 aa, synthetic construct
GVPDRFSGSNSGNSASLAITGLQAEDEADYFC

SEQ ID NO: 7340 - protein, 23 aa, synthetic construct
DSVTTQSPLSLPVTLGQPASISC

SEQ ID NO: 7341 - protein, 15 aa, synthetic construct
WYQQRPGQSPRMLIY

SEQ ID NO: 7342 - protein, 32 aa, synthetic construct; identical to SEQ ID NO: 305

SEQ ID NO: 7343 - protein, 124 aa, synthetic construct
QVQLVQSGAEVKKPGSSVKVSCKASGYTFTGYVMHWVRQAPGQGLEWMGFINPYNDDIQSNERFRGRVTITSDKSTTTAYMELSSLRSEDTAVYYCARGAGYNFDGAYRFFDFWGQGTTVTVSS

SEQ ID NO: 7344 - protein, 124 aa, synthetic construct
QVQLVQSGAEVKKPGASVKVSCKASGYTFTGYVMHWVRQAPGQGLEWMGFINPYNDDIQSNERFRGRVTMTSDKSITTAYMELSRLRSDDTAVYYCARGAGYNFDGAYRFFDFWGQGTTVTVSS

SEQ ID NO: 7345 - protein, 30 aa, synthetic construct
QVQLVQSGAEVKKPGSSVKVSCKASGYTFT

SEQ ID NO: 7346 - skipped

SEQ ID NO: 7347 - protein, 11 aa, synthetic construct
WGQGTTVTVSS

SEQ ID NO: 7348 - skipped

SEQ ID NO: 7349 - protein, 32 aa, synthetic construct
RVTMTSDKSITTAYMELSRLRSDDTAVYYCAR

SEQ ID NO: 7350 - protein, 124 aa, synthetic construct
QVQLVQSGAEVKKPGSSVKVSCKASGYTFSGYAISWVRQAPGQGLEWMGFINPYNDDIQSNERFRGRVTITSDKSTTTAYMELSSLRSEDTAVYYCARGAGYNFDGAYRFFDFWGQGTLVTVSS

SEQ ID NO: 7351 - protein, 124 aa, synthetic construct; identical to SEQ ID NO: 517

SEQ ID NO: 7352 - protein, 124 aa, synthetic construct
QVQLVQSGAEVKKPGSSVKVSCKASGYTFSGYAISWVRQAPGQGLEWMGFIIPIFGTANYAQKFQGRVTITSDKSTTTAYMELSSLRSEDTAVYYCARGAGYNFDGAYRFFDFWGQGTLVTVSS

SEQ ID NO: 7353 - protein, 30 aa, synthetic construct
QVQLVQSGAEVKKPGSSVKVSCKASGYTFS

SEQ ID NO: 7354 - protein, 5 aa, synthetic construct
GYAIS

SEQ ID NO: 7355 - protein, 17 aa, synthetic construct
FIIPIFGTANYAQKFQG

SEQ ID NO: 7356 - skipped

SEQ ID NO: 7357 - protein, 111 aa, synthetic construct
DVVMTQSPLSLPVTLGQPASISCRSSQSLVYSDGNTYHWYQQRPGQSPRLLIYRVSNRFPGVPDRFSGSGSGTDFTLKISRVEAEDVGVYFCSQSTHVPYTFGGGTKVEIK

SEQ ID NO: 7358 - protein, 112 aa, synthetic construct
DVVMTQSPLSLPVTLGQPASISCRSSQRLVHSNGNTYLHWYQQRPGQSPRLLIYKVSNRDSGVPDRFSGSGSGTDFTLKISRVEAEDVGVYFCSQSTHVPYTFGGGTKVEIK

SEQ ID NO: 7359 - protein, 112 aa, synthetic construct
DVVMTQSPLSLPVTLGQPASISCRSSQRLVHSNGNTYLHWYQQRPGQSPRLLIYRVSNRFPGVPDRFSGSGSGTDFTLKISRVEAEDVGVYFCMQSTHWPYTFGGGTKVEIK

SEQ ID NO: 7360 - protein, 111 aa, synthetic construct
DVVMTQSPLSLPVTLGQPASISCRSSQSLVYSDGNTYHWYQQRPGQSPRLLIYKVSNRDSGVPDRFSGSGSGTDFTLKISRVEAEDVGVYFCMQSTHWPYTFGGGTKVEIK

SEQ ID NO: 7361-7366 - skipped (6 entries)

SEQ ID NO: 7367 - protein, 15 aa, synthetic construct
RSSQSLVYSDGNTYH

SEQ ID NO: 7368 - protein, 7 aa, synthetic construct
KVSNRDS

SEQ ID NO: 7369 - protein, 9 aa, synthetic construct
MQSTHWPYT

SEQ ID NO: 7370 - protein, 30 aa, synthetic construct; identical to SEQ ID NO: 203

SEQ ID NO: 7371 - protein, 32 aa, synthetic construct; identical to SEQ ID NO: 6014

SEQ ID NO: 7372 - protein, 32 aa, synthetic construct; identical to SEQ ID NO: 6018

SEQ ID NO: 7373 - protein, 32 aa, synthetic construct; identical to SEQ ID NO: 6022

SEQ ID NO: 7374 - protein, 32 aa, synthetic construct; identical to SEQ ID NO: 6026

SEQ ID NO: 7375 - protein, 32 aa, synthetic construct; identical to SEQ ID NO: 6030

SEQ ID NO: 7376 - protein, 32 aa, synthetic construct; identical to SEQ ID NO: 6035

SEQ ID NO: 7377 - protein, 32 aa, synthetic construct; identical to SEQ ID NO: 6051

SEQ ID NO: 7378 - protein, 32 aa, synthetic construct; identical to SEQ ID NO: 6059

SEQ ID NO: 7379 - protein, 454 aa, synthetic construct
QVQLVQSGAEVKKPGSSVKVSCKASGYTFTGYVMHWVRQAPGQGLEWMGFINPYNDDIQSNERFRGRVTITSDKSTTTAYMELSSLRSEDTAVYYCARGAGYNFDGAYRFFDFWGQGTLVTVSSASTKGPSVFPLAPSSKSTSGGTAALGCLVKDYFPEPVTVSWNSGALTSGVHTFPAVLQSSGLYSLSSVVTVPSSSLGTQTYICNVNHKPSNTKVDKRVEPKSCDKTHTCPPCPAPELLGGPSVFLFPPKPKDTLMISRTPEVTCVVVDVSHEDPEVKFNWYVDGVEVHNAKTKPREEQYASTYRVVSVLTVLHQDWLNGKEYKCKVSNKALPAPIEKTISKAKGQPREPQVYTLPPCREEMTKNQVSLWCLVKGFYPSDIAVEWESNGQPENNYKTTPPVLDSDGSFFLYSKLTVDKSRWQQGNVFSCSVMHEALHNHYTQKSLSLSPGK

SEQ ID NO: 7380 - protein, 219 aa, synthetic construct
DVVMTQSPLSLPVTLGQPASISCRSSQRLVHSNGNTYLHWYQQRPGQSPRLLIYRVSNRFPGVPDRFSGSGSGTDFTLKISRVEAEDVGVYFCSQSTHVPYTFGGGTKVEIKRTVAAPSVFIFPPSDEQLKSGTASVVCLLNNFYPREAKVQWKVDNALQSGNSQESVTEQDSKDSTYSLSSTLTLSKADYEKHKVYACEVTHQGLSSPVTKSFNRGEC

SEQ ID NO: 7381 - protein, 472 aa, synthetic construct
QIQLQESGPGLVKPSQSLSLSCSVTGFSITTTGYHWNWIRQFPGKKLEWMGYIYSSGSTSYNPSLKSRFSITRDTSKNQFFLQLNSVTTEDTATYYCARGDWHYFDYWGPGTMVTVSSGGGGSGGGGSGGGGSGGGGSSFTLTQPPLVSVAVGQVATITCSGEKLSDKYVHWYQQKPGRAPVMVIYENDRRPSGIPDQFSGSNSGNIASLTISKAQAGDEADYFCQFWDSTNSAVFGGGTQLTVLDKTHTCPPCPAPELLGGPSVFLFPPKPKDTLMISRTPEVTCVVVDVSHEDPEVKFNWYVDGVEVHNAKTKPREEQYASTYRVVSVLTVLHQDWLNGKEYKCKVSNKALPAPIEKTISKAKGQPREPQVCTLPPSREEMTKNQVSLSCAVKGFYPSDIAVEWESNGQPENNYKTTPPVLDSDGSFFLVSKLTVDKSRWQQGNVFSCSVMHEALHNRFTQKSLSLSPGK

SEQ ID NO: 7382 - protein, 454 aa, synthetic construct
QVQLVQSGAEVKKPGSSVKVSCKASGYTFTGYVMHWVRQAPGQGLEWMGFIIPIFGTANYAQKFQGRVTITSDKSTTTAYMELSSLRSEDTAVYYCARGAGYNFDGAYRFFDFWGQGTLVTVSSASTKGPSVFPLAPSSKSTSGGTAALGCLVKDYFPEPVTVSWNSGALTSGVHTFPAVLQSSGLYSLSSVVTVPSSSLGTQTYICNVNHKPSNTKVDKRVEPKSCDKTHTCPPCPAPELLGGPSVFLFPPKPKDTLMISRTPEVTCVVVDVSHEDPEVKFNWYVDGVEVHNAKTKPREEQYASTYRVVSVLTVLHQDWLNGKEYKCKVSNKALPAPIEKTISKAKGQPREPQVYTLPPCREEMTKNQVSLWCLVKGFYPSDIAVEWESNGQPENNYKTTPPVLDSDGSFFLYSKLTVDKSRWQQGNVFSCSVMHEALHNHYTQKSLSLSPGK

SEQ ID NO: 7383 - protein, 473 aa, synthetic construct
EIQLLESGGGLVQPGGSLRLSCAVSGFSITTTGYHWNWVRQAPGKGLEWVGYIYSSGSTSYNPSLKSRFTISRDTSKNTFYLQMNSLRAEDTAVYYCARGDWHYFDYWGQGTMVTVSSGGGGSGGGGSGGGGSGGGGSDSVTTQSPLSLPVTLGQPASISCSGEKLSDKYVHWYQQRPGQSPRMLIYENDRRPSGVPDRFSGSNSGNDATLKISRVEAEDVGVYFCQFWDSTNSAVFGGGTKVEIKDKTHTCPPCPAPELLGGPSVFLFPPKPKDTLMISRTPEVTCVVVDVSHEDPEVKFNWYVDGVEVHNAKTKPREEQYASTYRVVSVLTVLHQDWLNGKEYKCKVSNKALPAPIEKTISKAKGQPREPQVCTLPPSREEMTKNQVSLSCAVKGFYPSDIAVEWESNGQPENNYKTTPPVLDSDGSFFLVSKLTVDKSRWQQGNVFSCSVMHEALHNHYTQKSLSLSPGK

SEQ ID NO: 7384 - protein, 472 aa, synthetic construct
EIQLLESGGGLVQPGGSLRLSCAVSGFSITTTGYHWNWVRQAPGKGLEWVGYIYSSGSTSYNPSLKSRFTISRDTSKNTFYLQMNSLRAEDTAVYYCARGDWHYFDYWGQGTMVTVSSGGGGSGGGGSGGGGSGGGGSSSETTQPPSVSVSPGQTASITCSGEKLSDKYVHWYQQKPGQSPVMVIYENDRRPSGIPERFSGSNSGNTATLTISGTQAMDEADYFCQFWDSTNSAVFGGGTQLTVLDKTHTCPPCPAPELLGGPSVFLFPPKPKDTLMISRTPEVTCVVVDVSHEDPEVKFNWYVDGVEVHNAKTKPREEQYASTYRVVSVLTVLHQDWLNGKEYKCKVSNKALPAPIEKTISKAKGQPREPQVCTLPPSREEMTKNQVSLSCAVKGFYPSDIAVEWESNGQPENNYKTTPPVLDSDGSFFLVSKLTVDKSRWQQGNVFSCSVMHEALHNHYTQKSLSLSPGK

SEQ ID NO: 7385 - protein, 16 aa, synthetic construct
YIYSSGTTKYNPSLKS

SEQ ID NO: 7386-7392 - skipped (7 entries)

SEQ ID NO: 7393 - protein, 30 aa, synthetic construct
QVQLVQSGAEVKKPGASVKVSCKASGYTFP

SEQ ID NO: 7394 - protein, 5 aa, synthetic construct
GFVMH

SEQ ID NO: 7395 - protein, 10 aa, synthetic construct
QFWASTNSAV

SEQ ID NO: 7396 - skipped

SEQ ID NO: 7397 - protein, 30 aa, synthetic construct
QVQLVQSGAEVKKPGASVKVSCKASGYPFH

SEQ ID NO: 7398 - protein, 14 aa, synthetic construct
WVRQAPGKGLEWVG

SEQ ID NO: 7399 - protein, 30 aa, synthetic construct
QVQLVQSGAEVKKPGASVKVSCKASGYTYP

SEQ ID NO: 7400 - protein, 15 aa, synthetic construct
GNGKWFDGAYRFFDF

SEQ ID NO: 7401 - protein, 5 aa, synthetic construct
GYHMH

SEQ ID NO: 7402 - skipped

SEQ ID NO: 7403 - protein, 15 aa, synthetic construct
GNGKWGDGAYRFFDF

SEQ ID NO: 7404 - protein, 30 aa, synthetic construct
QVQLVQSGAEVKKPGASVKVSCKASSQNFH

SEQ ID NO: 7405 - protein, 5 aa, synthetic construct
GFYMH

SEQ ID NO: 7406 - protein, 30 aa, synthetic construct
QVQLVQSGAEVKKPGASVKVSCKASYQDFH

SEQ ID NO: 7407 - protein, 5 aa, synthetic construct
GYKMH

SEQ ID NO: 7408 - protein, 30 aa, synthetic construct
QVQLVQSGAEVKKPGASVKVSCKASGYNFH

SEQ ID NO: 7409 - protein, 16 aa, synthetic construct
RSSQNLVHSNGRTYLH

SEQ ID NO: 7410 - protein, 16 aa, synthetic construct
RSSQNLVHSNGRTYLQ

SEQ ID NO: 7411 - protein, 124 aa, synthetic construct
QVQLVQSGAEVKKPGASVKVSCKASGYTFPGFVMHWVRQAPGQGLEWMGFINPYNDDIQSNERFRGRVTMTSDKSTTTAYMELSSLRSEDTAVYYCARGNGMWFDGAYRFFDFWGQGTLVTVSS

SEQ ID NO: 7412 - protein, 124 aa, synthetic construct
QVQLVQSGAEVKKPGASVKVSCKASGYPFHGYVMHWVRQAPGQGLEWMGFINPYNDDIQSNERFRGRVTMTSDKSTTTAYMELSSLRSEDTAVYYCARGNGKNFDGAYRFFDFWGQGTLVTVSS

SEQ ID NO: 7413 - protein, 124 aa, synthetic construct
QVQLVQSGAEVKKPGASVKVSCKASGYTYPGYVMHWVRQAPGQGLEWMGFINPYNDDIQSNERFRGRVTMTSDKSTTTAYMELSSLRSEDTAVYYCARGNGKWFDGAYRFFDFWGQGTLVTVSS

SEQ ID NO: 7414 - protein, 124 aa, synthetic construct
QVQLVQSGAEVKKPGASVKVSCKASNQNFHGYHMHWVRQAPGQGLEWMGFINPYNDDIQSNERFRGRVTMTSDKSTTTAYMELSSLRSEDTAVYYCARGNGKWGDGAYRFFDFWGQGTLVTVSS

SEQ ID NO: 7415 - protein, 124 aa, synthetic construct
QVQLVQSGAEVKKPGASVKVSCKASSQNFHGFYMHWVRQAPGQGLEWMGFINPYNDDIQSNERFRGRVTMTSDKSTTTAYMELSSLRSEDTAVYYCARGNGKWGDGAYRFFDFWGQGTLVTVSS

SEQ ID NO: 7416 - protein, 124 aa, synthetic construct
QVQLVQSGAEVKKPGASVKVSCKASYQDFHGYKMHWVRQAPGQGLEWMGFINPYNDDIQSNERFRGRVTMTSDKSTTTAYMELSSLRSEDTAVYYCARGNGKWGDGAYRFFDFWGQGTLVTVSS

SEQ ID NO: 7417 - protein, 124 aa, synthetic construct
QVQLVQSGAEVKKPGASVKVSCKASGYNFHGFYMHWVRQAPGQGLEWMGFINPYNDDIQSNERFRGRVTMTSDKSTTTAYMELSSLRSEDTAVYYCARGNGKWGDGAYRFFDFWGQGTLVTVSS

SEQ ID NO: 7418 - protein, 112 aa, synthetic construct
DVVMTQSPLSLPVTPGEPASISCRSSQNLVHSNGRTYLHWYLQKPGQSPQLLIYRVSNRFPGVPDRFSGSGSGTDFTLKISRVEAEDVGVYFCSQSTHVPYTFGGGTKVEIK

SEQ ID NO: 7419 - protein, 112 aa, synthetic construct
DVVMTQSPLSLPVTPGEPASISCRSSQNLVHSNGRTYLQWYLQKPGQSPQLLIYRVSNRFPGVPDRFSGSGSGTDFTLKISRVEAEDVGVYFCSQSTHVPYTFGGGTKVEIK

SEQ ID NO: 7420 - protein, 124 aa, synthetic construct
QVQLVQSGAEVKKPGASVKVSCKASTSGFHGYPMHWVRQAPGQGLEWMGFINPYNDDIQSNERFRGRVTMTSDKSTTTAYMELSSLRSEDTAVYYCARGNGKWGDGAYRFFDFWGQGTLVTVSS

SEQ ID NO: 7421 - protein, 30 aa, synthetic construct
QVQLVQSGAEVKKPGASVKVSCKASTSGFH

SEQ ID NO: 7422 - protein, 5 aa, synthetic construct
GYPMH

SEQ ID NO: 7423 - protein, 124 aa, synthetic construct
QVQLVQSGAEVKKPGASVKVSCKASPRGFHGYHMHWVRQAPGQGLEWMGFINPYNDDIQSNERFRGRVTMTSDKSTTTAYMELSSLRSEDTAVYYCARGNGKWGDGAYRFFDFWGQGTLVTVSS

SEQ ID NO: 7424 - protein, 30 aa, synthetic construct
QVQLVQSGAEVKKPGASVKVSCKASPRGFH

SEQ ID NO: 7425 - protein, 124 aa, synthetic construct
QVQLVQSGAEVKKPGASVKVSCKASFQDFHGYAMHWVRQAPGQGLEWMGFINPYNDDIQSNERFRGRVTMTSDKSTTTAYMELSSLRSEDTAVYYCARGNGKWGDGAYRFFDFWGQGTLVTVSS

SEQ ID NO: 7426 - protein, 30 aa, synthetic construct
QVQLVQSGAEVKKPGASVKVSCKASFQDFH

SEQ ID NO: 7427 - protein, 5 aa, synthetic construct
GYAMH

SEQ ID NO: 7428 - protein, 124 aa, synthetic construct
QVQLVQSGAEVKKPGASVKVSCKASSKDFHGFAMHWVRQAPGQGLEWMGFINPYNDDIQSNERFRGRVTMTSDKSTTTAYMELSSLRSEDTAVYYCARGNGKWGDGAYRFFDFWGQGTLVTVSS

SEQ ID NO: 7429 - protein, 30 aa, synthetic construct
QVQLVQSGAEVKKPGASVKVSCKASSKDFH

SEQ ID NO: 7430 - protein, 5 aa, synthetic construct
GFAMH

SEQ ID NO: 7431 - protein, 124 aa, synthetic construct
QVQLVQSGAEVKKPGASVKVSCKASPKGFHGYHMHWVRQAPGQGLEWMGFINPYNDDIQSNERFRGRVTMTSDKSTTTAYMELSSLRSEDTAVYYCARGNGKWGDGAYRFFDFWGQGTLVTVSS

SEQ ID NO: 7432 - protein, 30 aa, synthetic construct
QVQLVQSGAEVKKPGASVKVSCKASPKGFH

SEQ ID NO: 7433 - protein, 256 aa, synthetic construct
QVQLVQSGAEVKKPGASVKVSCKASTSGFHGYPMHWVRQAPGQGLEWMGFINPYNDDIQSNERFRGRVTMTSDKSTTTAYMELSSLRSEDTAVYYCARGNGKWGDGAYRFFDFWGQGTLVTVSSGGGGSGGGGSGGGGSGGGGSDVVMTQSPLSLPVTPGEPASISCRSSQNLVHSNGRTYLQWYLQKPGQSPQLLIYRVSNRFPGVPDRFSGSGSGTDFTLKISRVEAEDVGVYFCSQSTHVPYTFGGGTKVEIK

SEQ ID NO: 7434 - protein, 256 aa, synthetic construct
QVQLVQSGAEVKKPGASVKVSCKASPRGFHGYHMHWVRQAPGQGLEWMGFINPYNDDIQSNERFRGRVTMTSDKSTTTAYMELSSLRSEDTAVYYCARGNGKWGDGAYRFFDFWGQGTLVTVSSGGGGSGGGGSGGGGSGGGGSDVVMTQSPLSLPVTPGEPASISCRSSQNLVHSNGRTYLQWYLQKPGQSPQLLIYRVSNRFPGVPDRFSGSGSGTDFTLKISRVEAEDVGVYFCSQSTHVPYTFGGGTKVEIK

SEQ ID NO: 7435 - protein, 256 aa, synthetic construct
QVQLVQSGAEVKKPGASVKVSCKASFQDFHGYAMHWVRQAPGQGLEWMGFINPYNDDIQSNERFRGRVTMTSDKSTTTAYMELSSLRSEDTAVYYCARGNGKWGDGAYRFFDFWGQGTLVTVSSGGGGSGGGGSGGGGSGGGGSDVVMTQSPLSLPVTPGEPASISCRSSQNLVHSNGRTYLQWYLQKPGQSPQLLIYRVSNRFPGVPDRFSGSGSGTDFTLKISRVEAEDVGVYFCSQSTHVPYTFGGGTKVEIK

SEQ ID NO: 7436 - protein, 256 aa, synthetic construct
QVQLVQSGAEVKKPGASVKVSCKASSKDFHGFAMHWVRQAPGQGLEWMGFINPYNDDIQSNERFRGRVTMTSDKSTTTAYMELSSLRSEDTAVYYCARGNGKWGDGAYRFFDFWGQGTLVTVSSGGGGSGGGGSGGGGSGGGGSDVVMTQSPLSLPVTPGEPASISCRSSQNLVHSNGRTYLQWYLQKPGQSPQLLIYRVSNRFPGVPDRFSGSGSGTDFTLKISRVEAEDVGVYFCSQSTHVPYTFGGGTKVEIK

SEQ ID NO: 7437 - protein, 256 aa, synthetic construct
QVQLVQSGAEVKKPGASVKVSCKASPKGFHGYHMHWVRQAPGQGLEWMGFINPYNDDIQSNERFRGRVTMTSDKSTTTAYMELSSLRSEDTAVYYCARGNGKWGDGAYRFFDFWGQGTLVTVSSGGGGSGGGGSGGGGSGGGGSDVVMTQSPLSLPVTPGEPASISCRSSQNLVHSNGRTYLQWYLQKPGQSPQLLIYRVSNRFPGVPDRFSGSGSGTDFTLKISRVEAEDVGVYFCSQSTHVPYTFGGGTKVEIK

SEQ ID NO: 7438 - protein, 454 aa, synthetic construct
QVQLVQSGAEVKKPGASVKVSCKASTSGFHGYPMHWVRQAPGQGLEWMGFINPYNDDIQSNERFRGRVTMTSDKSTTTAYMELSSLRSEDTAVYYCARGNGKWGDGAYRFFDFWGQGTLVTVSSASTKGPSVFPLAPSSKSTSGGTAALGCLVKDYFPEPVTVSWNSGALTSGVHTFPAVLQSSGLYSLSSVVTVPSSSLGTQTYICNVNHKPSNTKVDKRVEPKSCDKTHTCPPCPAPELLGGPSVFLFPPKPKDTLMISRTPEVTCVVVDVSHEDPEVKFNWYVDGVEVHNAKTKPREEQYASTYRVVSVLTVLHQDWLNGKEYKCKVSNKALPAPIEKTISKAKGQPREPQVYTLPPCREEMTKNQVSLWCLVKGFYPSDIAVEWESNGQPENNYKTTPPVLDSDGSFFLYSKLTVDKSRWQQGNVFSCSVMHEALHNHYTQKSLSLSPGK

SEQ ID NO: 7439 - protein, 219 aa, synthetic construct
DVVMTQSPLSLPVTPGEPASISCRSSQNLVHSNGRTYLQWYLQKPGQSPQLLIYRVSNRFPGVPDRFSGSGSGTDFTLKISRVEAEDVGVYFCSQSTHVPYTFGGGTKVEIKRTVAAPSVFIFPPSDEQLKSGTASVVCLLNNFYPREAKVQWKVDNALQSGNSQESVTEQDSKDSTYSLSSTLTLSKADYEKHKVYACEVTHQGLSSPVTKSFNRGEC

SEQ ID NO: 7440 - protein, 454 aa, synthetic construct
QVQLVQSGAEVKKPGASVKVSCKASPRGFHGYHMHWVRQAPGQGLEWMGFINPYNDDIQSNERFRGRVTMTSDKSTTTAYMELSSLRSEDTAVYYCARGNGKWGDGAYRFFDFWGQGTLVTVSSASTKGPSVFPLAPSSKSTSGGTAALGCLVKDYFPEPVTVSWNSGALTSGVHTFPAVLQSSGLYSLSSVVTVPSSSLGTQTYICNVNHKPSNTKVDKRVEPKSCDKTHTCPPCPAPELLGGPSVFLFPPKPKDTLMISRTPEVTCVVVDVSHEDPEVKFNWYVDGVEVHNAKTKPREEQYASTYRVVSVLTVLHQDWLNGKEYKCKVSNKALPAPIEKTISKAKGQPREPQVYTLPPCREEMTKNQVSLWCLVKGFYPSDIAVEWESNGQPENNYKTTPPVLDSDGSFFLYSKLTVDKSRWQQGNVFSCSVMHEALHNHYTQKSLSLSPGK

SEQ ID NO: 7441 - skipped

SEQ ID NO: 7442 - protein, 15 aa, synthetic construct
  VARIANT 4: note = K or M
  VARIANT 5: note = W or N
  VARIANT 6: note = G or F
GNGXXXDGAYRFFDF

SEQ ID NO: 7443 - protein, 16 aa, synthetic construct
  VARIANT 16: note = Q or H
RSSQNLVHSNGRTYLX

SEQ ID NO: 7444-8000 - skipped (557 entries)

SEQ ID NO: 8001 - protein, 454 aa, synthetic construct
QVQLVQSGAEVKKPGSSVKVSCKASPRGFYGYHMHWVRQAPGQGLEWMGFINPYTNDIQYNERFRGRVTITSDESTTTAYMELSSLRSEDTAVYYCAMGNGKWGDGAYRFFDLWGQGTLVTVSSASTKGPSVFPLAPSSKSTSGGTAALGCLVKDYFPEPVTVSWNSGALTSGVHTFPAVLQSSGLYSLSSVVTVPSSSLGTQTYICNVNHKPSNTKVDKRVEPKSCDKTHTCPPCPAPELLGGPSVFLFPPKPKDTLMISRTPEVTCVVVDVSHEDPEVKFNWYVDGVEVHNAKTKPREEQYASTYRVVSVLTVLHQDWLNGKEYKCKVSNKALPAPIEKTISKAKGQPREPQVYTLPPCREEMTKNQVSLWCLVKGFYPSDIAVEWESNGQPENNYKTTPPVLDSDGSFFLYSKLTVDKSRWQQGNVFSCSVMHEALHNHYTQKSLSLSPGK

SEQ ID NO: 8002 - protein, 219 aa, synthetic construct
DVVMTQSPLSLPVTLGQPASISCRSSENLVHSNGRTYLQWYQQRPGQSPRLLIYRVSNRFPGVPDRFSGSGSGTDFTLKISRVEAEDVGVYFCSQSSLEPYTFGGGTKVEIKRTVAAPSVFIFPPSDEQLKSGTASVVCLLNNFYPREAKVQWKVDNALQSGNSQESVTEQDSKDSTYSLSSTLTLSKADYEKHKVYACEVTHQGLSSPVTKSFNRGEC

SEQ ID NO: 8003 - protein, 473 aa, synthetic construct; identical to SEQ ID NO: 7383

SEQ ID NO: 8004 - protein, 454 aa, synthetic construct
QVQLVQSGAEVKKPGSSVKVSCKASPRGFYGYHMHWVRQAPGQGLEWMGFINPYNNHIQYNERFRGRVTITSDESTTTAYMELSSLRSEDTAVYYCALGNGKWGDGAYRFFDFWGQGTLVTVSSASTKGPSVFPLAPSSKSTSGGTAALGCLVKDYFPEPVTVSWNSGALTSGVHTFPAVLQSSGLYSLSSVVTVPSSSLGTQTYICNVNHKPSNTKVDKRVEPKSCDKTHTCPPCPAPELLGGPSVFLFPPKPKDTLMISRTPEVTCVVVDVSHEDPEVKFNWYVDGVEVHNAKTKPREEQYASTYRVVSVLTVLHQDWLNGKEYKCKVSNKALPAPIEKTISKAKGQPREPQVYTLPPCREEMTKNQVSLWCLVKGFYPSDIAVEWESNGQPENNYKTTPPVLDSDGSFFLYSKLTVDKSRWQQGNVFSCSVMHEALHNHYTQKSLSLSPGK

SEQ ID NO: 8005 - protein, 219 aa, synthetic construct
DVVMTQSPLSLPVTLGQPASISCRSSKNLVHSNGRTYLQWYQQRPGQSPRLLIYRVSNRFPGVPDRFSGSGSGTDFTLKISRVEAEDVGVYFCSQSTREPYTFGGGTKVEIKRTVAAPSVFIFPPSDEQLKSGTASVVCLLNNFYPREAKVQWKVDNALQSGNSQESVTEQDSKDSTYSLSSTLTLSKADYEKHKVYACEVTHQGLSSPVTKSFNRGEC

SEQ ID NO: 8006 - protein, 473 aa, synthetic construct; identical to SEQ ID NO: 7383

SEQ ID NO: 8007 - protein, 454 aa, synthetic construct
QVQLVQSGAEVKKPGSSVKVSCKASPRGFYGYHMHWVRQAPGQGLEWMGFINPYNNHIQYNERFRGRVTITSDESTTTAYMELSSLRSEDTAVYYCALGEGKWGDGAYRFFDFWGQGTLVTVSSASTKGPSVFPLAPSSKSTSGGTAALGCLVKDYFPEPVTVSWNSGALTSGVHTFPAVLQSSGLYSLSSVVTVPSSSLGTQTYICNVNHKPSNTKVDKRVEPKSCDKTHTCPPCPAPELLGGPSVFLFPPKPKDTLMISRTPEVTCVVVDVSHEDPEVKFNWYVDGVEVHNAKTKPREEQYASTYRVVSVLTVLHQDWLNGKEYKCKVSNKALPAPIEKTISKAKGQPREPQVYTLPPCREEMTKNQVSLWCLVKGFYPSDIAVEWESNGQPENNYKTTPPVLDSDGSFFLYSKLTVDKSRWQQGNVFSCSVMHEALHNHYTQKSLSLSPGK

SEQ ID NO: 8008 - skipped

SEQ ID NO: 8009 - protein, 454 aa, synthetic construct
QVQLVQSGAEVKKPGSSVKVSCKASPRGFYGYHMHWVRQAPGQGLEWMGFINPYNNHIQYNERFRGRVTITSDESTTTAYMELSSLRSEDTAVYYCALGAGKWGDGAYRFFDFWGQGTLVTVSSASTKGPSVFPLAPSSKSTSGGTAALGCLVKDYFPEPVTVSWNSGALTSGVHTFPAVLQSSGLYSLSSVVTVPSSSLGTQTYICNVNHKPSNTKVDKRVEPKSCDKTHTCPPCPAPELLGGPSVFLFPPKPKDTLMISRTPEVTCVVVDVSHEDPEVKFNWYVDGVEVHNAKTKPREEQYASTYRVVSVLTVLHQDWLNGKEYKCKVSNKALPAPIEKTISKAKGQPREPQVYTLPPCREEMTKNQVSLWCLVKGFYPSDIAVEWESNGQPENNYKTTPPVLDSDGSFFLYSKLTVDKSRWQQGNVFSCSVMHEALHNHYTQKSLSLSPGK

SEQ ID NO: 8010 - skipped

SEQ ID NO: 8011 - protein, 124 aa, synthetic construct
QVQLVQSGAEVKKPGSSVKVSCKASPRGFYGYHMHWVRQAPGQGLEWMGFINPYTNDIQYNERFRGRVTITSDESTTTAYMELSSLRSEDTAVYYCAMGNGKWGDGAYRFFDLWGQGTLVTVSS

SEQ ID NO: 8012 - protein, 112 aa, synthetic construct
DVVMTQSPLSLPVTLGQPASISCRSSENLVHSNGRTYLQWYQQRPGQSPRLLIYRVSNRFPGVPDRFSGSGSGTDFTLKISRVEAEDVGVYFCSQSSLEPYTFGGGTKVEIK

SEQ ID NO: 8013 - protein, 124 aa, synthetic construct
QVQLVQSGAEVKKPGSSVKVSCKASPRGFYGYHMHWVRQAPGQGLEWMGFINPYNNHIQYNERFRGRVTITSDESTTTAYMELSSLRSEDTAVYYCALGNGKWGDGAYRFFDFWGQGTLVTVSS

SEQ ID NO: 8014 - protein, 112 aa, synthetic construct
DVVMTQSPLSLPVTLGQPASISCRSSKNLVHSNGRTYLQWYQQRPGQSPRLLIYRVSNRFPGVPDRFSGSGSGTDFTLKISRVEAEDVGVYFCSQSTREPYTFGGGTKVEIK

SEQ ID NO: 8015-8019 - skipped (5 entries)

SEQ ID NO: 8020 - protein, 124 aa, synthetic construct
QVQLVQSGAEVKKPGSSVKVSCKASPRGFYGYHMHWVRQAPGQGLEWMGFINPYNNHIQYNERFRGRVTITSDESTTTAYMELSSLRSEDTAVYYCALGEGKWGDGAYRFFDFWGQGTLVTVSS

SEQ ID NO: 8021-8023 - skipped (3 entries)

SEQ ID NO: 8024 - protein, 124 aa, synthetic construct
QVQLVQSGAEVKKPGASVKVSCKASGYTFTGYVMHWVRQAPGQGLEWMGFINPYNDDIQSNERFRGRVTMTRDTSISTAYMELSRLRSDDTAVYYCARGAGYNFDGAYRFFDFWGQGTMVTVSS

SEQ ID NO: 8025 - protein, 112 aa, synthetic construct
DIVMTQSPLSLPVTPGEPASISCRSSQRLVHSNGNTYLHWYLQKPGQSPRLLIYRVSNRFPGVPDRFSGSGSGTDFTLKISRVEAEDVGVYYCSQSTHVPYTFGQGTKLEIK

SEQ ID NO: 8026-8029 - skipped (4 entries)

SEQ ID NO: 8030 - protein, 118 aa, synthetic construct
EIQLLESGGGLVQPGGSLRLSCAVSGFSITTTGYHWNWVRQAPGKGLEWVGYIYSSGSTSYNPSLKSRFTISRDTSKNTFYLQMNSLRAEDTAVYYCARGDWHYFDYWGQGTMVTVSS

SEQ ID NO: 8031-8040 - skipped (10 entries)

SEQ ID NO: 8041 - protein, 7 aa, synthetic construct
PRGFYGY

SEQ ID NO: 8042 - protein, 19 aa, synthetic construct
MGFINPYTNDIQYNERFRG

SEQ ID NO: 8043 - protein, 15 aa, synthetic construct
GNGKWGDGAYRFFDL

SEQ ID NO: 8044 - protein, 17 aa, synthetic construct
FINPYNNHIQYNERFRG

SEQ ID NO: 8045 - skipped

SEQ ID NO: 8046 - protein, 15 aa, synthetic construct
GEGKWGDGAYRFFDF

SEQ ID NO: 8047 - protein, 15 aa, synthetic construct
GAGKWGDGAYRFFDF

SEQ ID NO: 8048 - protein, 16 aa, synthetic construct
RSSENLVHSNGRTYLQ

SEQ ID NO: 8049 - skipped

SEQ ID NO: 8050 - protein, 9 aa, synthetic construct
SQSSLEPYT

SEQ ID NO: 8051 - protein, 16 aa, synthetic construct
RSSKNLVHSNGRTYLQ

SEQ ID NO: 8052 - protein, 9 aa, synthetic construct
SQSTREPYT

SEQ ID NO: 8053-8058 - skipped (6 entries)

SEQ ID NO: 8059 - protein, 124 aa, synthetic construct
QVQLVQSGAEVKKPGASVKVSCKASRSGFHGYAMHWVRQAPGQGLEWMGFINPYNDDIQYNQKFQGRVTITADESTSTAYMELSSLRSEDTAVYYCARGNGKWGDGAYRFFDFWGQGTLVTVSS

SEQ ID NO: 8060 - protein, 112 aa, synthetic construct; identical to SEQ ID NO: 7419

SEQ ID NO: 8061 - protein, 124 aa, synthetic construct
QVQLVQSGAEVKKPGSSVKVSCKASPRGFYGYHMHWVRQAPGQGLEWMGYINPYNRDIKYNQKFQGRVTITADKSTTTAYMELSSLRSEDTAVYYCARGNGKWGDGAYRFFDFWGQGTLVTVSS

SEQ ID NO: 8062 - skipped

SEQ ID NO: 8063 - protein, 124 aa, synthetic construct
QVQLVQSGAEVKKPGSSVKVSCKASPRGFHGYHMHWVRQAPGQGLEWMGYINPYTGDIKYNERFRGRVTITSDESTTTAYMELSSLRSEDTAVYYCARGNGKWGDGAYRFFDLWGQGTLVTVSS

SEQ ID NO: 8064 - protein, 112 aa, synthetic construct
DVVMTQSPLSLPVTLGQPASISCRSSENLVHSNGRTYLQWYQQRPGQSPRLLIYRVSNRFPGVPDRFSGSGSGTDFTLKISRVEAEDVGVYFCSQSTLEPFTFGGGTKVEIK

SEQ ID NO: 8065 - protein, 124 aa, synthetic construct
QVQLVQSGAEVKKPGSSVKVSCKASPRGFYGYHMHWVRQAPGQGLEWMGFINPYNDDIQYNERFRGRVTITSDESTTTAYMELSSLRSEDTAVYYCALGNGKWGDGAYRFFDLWGQGTLVTVSS

SEQ ID NO: 8066 - protein, 112 aa, synthetic construct
DVVMTQSPLSLPVTLGQPASISCRSSQNLVHSNGRTYLQWYQQRPGQSPRLLIYRVSNRFPGVPDRFSGSGSGTDFTLKISRVEAEDVGVYFCSQSSLLPYTFGGGTKVEIK

SEQ ID NO: 8067 - protein, 124 aa, synthetic construct
QVQLVQSGAEVKKPGSSVKVSCKASPRGFYGYHMHWVRQAPGQGLEWMGFINPYNDDIQYNQKFQGRVTITADKSTTTAYMELSSLRSEDTAVYYCARGNGKWGDGAYRFFDFWGQGTLVTVSS

SEQ ID NO: 8068 - protein, 112 aa, synthetic construct; identical to SEQ ID NO: 7419

SEQ ID NO: 8069 - protein, 124 aa, synthetic construct; identical to SEQ ID NO: 8065

SEQ ID NO: 8070 - protein, 112 aa, synthetic construct; identical to SEQ ID NO: 8066

SEQ ID NO: 8071 - protein, 124 aa, synthetic construct; identical to SEQ ID NO: 8067

SEQ ID NO: 8072 - skipped

SEQ ID NO: 8073 - protein, 124 aa, synthetic construct
QVQLVQSGAEVKKPGASVKVSCKASRSGFHGYAMHWVRQAPGQGLEWMGFINPYNDDIQYNQKFQGRVTITADESTSTAYMELSSLRSEDTAVYYCARGNGKWGDGAYRFFDLWGQGTLVTVSS

SEQ ID NO: 8074 - protein, 112 aa, synthetic construct
DVVMTQSPLSLPVTLGQPASISCRSSQNLVHSNARTYLQWYQQRPGQSPRLLIYRVSNRFPGVPDRFSGSGSGTDFTLKISRVEAEDVGVYFCSQSTHVPYTFGGGTKVEIK

SEQ ID NO: 8075 - protein, 124 aa, synthetic construct
QVQLVQSGAEVKKPGSSVKVSCKASPRGFHGYHMHWVRQAPGQGLEWMGSINPYTRHIQYNERFRGRVTITSDESTTTAYMELSSLRSEDTAVYYCARGNGKWGDGAYRFFDFWGQGTLVTVSS

SEQ ID NO: 8076 - protein, 112 aa, synthetic construct
DVVMTQSPLSLPVTLGQPASISCRSSQNLVHSNGRTYLQWYQQRPGQSPRLLIYRVSNRFPGVPDRFSGSGSGTDFTLKISRVEAEDVGVYFCSQSSYVPFTFGGGTKVEIK

SEQ ID NO: 8077 - protein, 124 aa, synthetic construct
QVQLVQSGAEVKKPGSSVKVSCKASPRGFYGYHMHWVRQAPGQGLEWMGTINPYNRDIQYNQKFQGRVTITADKSTSTAYMELSSLRSEDTAVYYCARGNGKWGDGAYRFFDLWGQGTLVTVSS

SEQ ID NO: 8078 - protein, 112 aa, synthetic construct; identical to SEQ ID NO: 7419

SEQ ID NO: 8079 - protein, 124 aa, synthetic construct
QVQLVQSGAEVKKPGSSVKVSCKASPRGFYGYHMHWVRQAPGQGLEWMGTINPYNRDIQYNQKFQGRVTITADKSTSTAYMELSSLRSEDTAVYYCARGNGKWGDGAYRFFDFWGQGTLVTVSS

SEQ ID NO: 8080 - protein, 112 aa, synthetic construct; identical to SEQ ID NO: 7418

SEQ ID NO: 8081 - protein, 124 aa, synthetic construct
QVQLVQSGAEVKKPGSSVKVSCKASPRGFYGYHMHWVRQAPGQGLEWMGYINPYTNEIKYNERFRGRVTITSDESTTTAYMELSSLRSEDTAVYYCARGNGKWGDGAYRFFDLWGQGTLVTVSS

SEQ ID NO: 8082 - protein, 124 aa, synthetic construct
QVQLVQSGAEVKKPGSSVKVSCKASPRGFYGYHMHWVRQAPGQGLEWMGFINPYNDDIQYNQKFQGRVTITADESTSTAYMELSSLRSEDTAVYYCARGNGKWGDGAYRFFDFWGQGTLVTVSS

SEQ ID NO: 8083 - protein, 112 aa, synthetic construct; identical to SEQ ID NO: 7419

SEQ ID NO: 8084 - protein, 124 aa, synthetic construct
QVQLVQSGAEVKKPGSSVKVSCKASPRGFYGYHMHWVRQAPGQGLEWMGTINPYNAEIKYNQKFQGRVTITADKSTSTAYMELSSLRSEDTAVYYCARGNGKWGDGAYRFFDFWGQGTLVTVSS

SEQ ID NO: 8085 - protein, 112 aa, synthetic construct
DVVMTQSPLSLPVTPGEPASISCRSSQNLVHSNGRTYLQWYLQKPGQSPQLLIYRVSNRFPGVPDRFSGSGSGTDFTLKISRVEAEDVGVYYCSQSTYEPFTFGGGTKVEIK

SEQ ID NO: 8086 - protein, 124 aa, synthetic construct
QVQLVQSGAEVKKPGSSVKVSCKASPRGFYGYHMHWVRQAPGQGLEWMGFINPYNRDIKYNERFRGRVTITSDKSTTTAYMELSSLRSEDTAVYYCAMGNGKWGDGAYRFFDLWGQGTLVTVSS

SEQ ID NO: 8087 - protein, 112 aa, synthetic construct
DVVMTQSPLSLPVTLGQPASISCRSSKNLVHSNGRTYLQWYQQRPGQSPRLLIYRVSNRFPGVPDRFSGSGSGTDFTLKISRVEAEDVGVYFCSQSSHIPYTFGGGTKVEIK

SEQ ID NO: 8088 - protein, 124 aa, synthetic construct
QVQLVQSGAEVKKPGSSVKVSCKASPRGFYGYHMHWVRQAPGQGLEWMGAINPYTNDIKYNERFRGRVTITSDKSTTTAYMELSSLRSEDTAVYYCARGNGKWGDGAYRFFDLWGQGTLVTVSS

SEQ ID NO: 8089 - protein, 112 aa, synthetic construct; identical to SEQ ID NO: 7419

SEQ ID NO: 8090 - protein, 124 aa, synthetic construct
QVQLVHSGAEVKKPGSSVKVSCKASPRGFYGYHMHWVRQAPGQGLEWMGTINPYNRHIKYNQKFQGRVTITADKSTTTAYMELSSLRSEDTAVYYCARGNGKWGDGAYRFFDFWGQGTLVTVSS

SEQ ID NO: 8091 - skipped

SEQ ID NO: 8092 - protein, 124 aa, synthetic construct
QVQLVQSGAEVKKPGASVKVSCKASPRGFHGYHMHWVRQAPGQGLEWMGSINPYTDDIQYNERFRGRVTITSDESTTTAYMELSSLRSEDTAVYYCARGNGKWGDGAYRFFDFWGQGTLVTVSS

SEQ ID NO: 8093 - protein, 112 aa, synthetic construct
DVVMTQSPLSLPVTLGQPASISCRSSENLVHSNGRTYLQWYQQRPGQSPRLLIYRVSNRFPGVPDRFSGSGSGTDFTLKISRVEAEDVGVYFCSQSTHVPYTFGGGTKVEIK

SEQ ID NO: 8094 - protein, 124 aa, synthetic construct
QVQLVQSGAEVKKPGSSVKVSCKASPRGFYGYHMHWVRQAPGQGLEWMGAINPYTNHIQYNERFRGRVTITSDESTTTAYMELSSLRSEDTAVYYCARGNGKWGDGAYRFFDLWGQGTLVTVSS

SEQ ID NO: 8095 - protein, 112 aa, synthetic construct
DVVMTQSPLSLPVTLGQPASISCRSSQNLVHSNGRTYLQWYQQRPGQSPRLLIYRVSNRFPGVPDRFSGSGSGTDFTLKISRVEAEDVGVYFCSQSTHVPYTFGGGTKVEIK

SEQ ID NO: 8096 - protein, 124 aa, synthetic construct
QVQLVQSGAEVKKPGSSVKVSCKASPRGFYGYHMHWVRQAPGQGLEWMGFINPYNDDIQYNQKFQGRVTITADKSTSTAYMELSSLRSEDTAVYYCARGNGKWGDGAYRFFDFWGQGTLVTVSS

SEQ ID NO: 8097 - protein, 112 aa, synthetic construct
DVVMTQSPLSLPVTLGQPASISCRSSQNLVHSNARTYLQWYQQRPGQSPRLLIYRVSNRFPGVPDRFSGSGSGTDFTLKISRVEAEDVGVYYCSQSTYIPYTFGGGTKVEIK

SEQ ID NO: 8098 - protein, 124 aa, synthetic construct
QVQLVQSGAEVKKPGSSVKVSCKASPRGFHGYHMHWVRQAPGQGLEWMGFINPYTRAIKYNERFRGRVTITSDKSTTTAYMELSSLRSEDTAVYYCARGNGKWGDGAYRFFDLWGQGTLVTVSS

SEQ ID NO: 8099 - protein, 112 aa, synthetic construct
DVVMTQSPLSLPVTLGQPASISCRSSQNLVHSNGRTYLQWYLQKPGQSPQLLIYRVSNRFPGVPDRFSGSGSGTDFTLKISRVEAEDVGVYFCSQSTHVPYTFGGGTKVEIK

SEQ ID NO: 8100 - protein, 124 aa, synthetic construct
QVQLVQSGAEVKKPGSSVKVSCKASPRGFYGYHMHWVRQAPGQGLEWMGAINPYTRAIKYNERFRGRVTITSDESTTTAYMELSSLRSEDTAVYYCARGNGKWGDGAYRFFDLWGQGTLVTVSS

SEQ ID NO: 8101 - protein, 112 aa, synthetic construct
DVVMTQSPLSLPVTLGQPASISCRSSQNLVHSNGRTYLQWYQQRPGQSPRLLIYRVSNRFPGVPDRFSGSGSGTDFTLKISRVEAEDVGVYFCSQSTYEPYTFGGGTKVEIK

SEQ ID NO: 8102 - protein, 124 aa, synthetic construct
QVQLVQSGAEVKKPGSSVKVSCKASPRGFYGYHMHWVRQAPGQGLEWMGTINPYNGDIQYNERFRGRVTMTSDKSTTTAYMELSSLRSEDTAVYYCARGNGKWGDGAYRFFDFWGQGTLVTVSS

SEQ ID NO: 8103 - skipped

SEQ ID NO: 8104 - protein, 124 aa, synthetic construct
QVQLVQSGAEVKKPGSSVKVSCKASPRGFYGYHMHWVRQAPGQGLEWMGAINPYNTDIKYNERFRGRVTITSDESTTTAYMELSSLRSEDTAVYYCARGNGKWGDGAYRFFDLWGQGTLVTVSS

SEQ ID NO: 8105 - protein, 112 aa, synthetic construct; identical to SEQ ID NO: 8095

SEQ ID NO: 8106 - protein, 124 aa, synthetic construct
QVQLVQSGAEVKKPGSSVKVSCKASPRGFYGYHMHWVRQAPGQGLEWMGYINPYNGAIKYNQKFQGRVTITADESTSTAYMELSSLRSEDTAVYYCARGNGKWGDGAYRFFDLWGQGTLVTVSS

SEQ ID NO: 8107 - protein, 112 aa, synthetic construct; identical to SEQ ID NO: 8099

SEQ ID NO: 8108 - protein, 124 aa, synthetic construct
QVQLVQSGAEVKKPGSSVKVSCKASPRGFYGYHMHWVRQAPGQGLEWMGAINPYNDDIQSNERFRGRVTITSDKSTTTAYMELSSLRSEDTAVYYCARGNGKWGDGAYRFFDLWGQGTLVTVSS

SEQ ID NO: 8109 - protein, 112 aa, synthetic construct; identical to SEQ ID NO: 8099

SEQ ID NO: 8110 - protein, 124 aa, synthetic construct
QVQLVQSGAEVKKPGSSVKVSCKASPRGFYGYHMHWVRQAPGQGLEWMGFINPYNRAIQYNQKFQGRVTITADKSTTTAYMELSSLRSEDTAVYYCARGNGKWGDGAYRFFDFWGQGTLVTVSS

SEQ ID NO: 8111-8112 - skipped (2 entries)

SEQ ID NO: 8113 - protein, 124 aa, synthetic construct
QVQLVQSGAEVKKPGASVKVSCKASPRGFHGYHMHWVRQAPGQGLEWMGFINPYTNEIQYNERFRGRVTITSDESTTTAYMELSSLRSEDTAVYYCARGNGKWGDGAYRFFDLWGQGTLVTVSS

SEQ ID NO: 8114 - protein, 112 aa, synthetic construct; identical to SEQ ID NO: 8095

SEQ ID NO: 8115 - protein, 124 aa, synthetic construct
QVQLVQSGAEVKKPGSSVKVSCKASPRGFYGYHMHWVRQAPGQGLEWMGYINPYNHDIQYNQKFQGRVTITADKSTSTAYMELSSLRSEDTAVYYCARGNGKWGDGAYRFFDFWGQGTLVTVSS

SEQ ID NO: 8116 - skipped

SEQ ID NO: 8117 - protein, 124 aa, synthetic construct
QVQLVQSGAEVKKPGSSVKVSCKASPRGFYGYHMHWVRQAPGQGLEWMGSINPYTHDIQYNERFRGRVTITSDESTTTAYMELSSLRSEDTAVYYCARGNGKWGDGAYRFFDLWGQGTLVTVSS

SEQ ID NO: 8118 - protein, 112 aa, synthetic construct; identical to SEQ ID NO: 8099

SEQ ID NO: 8119 - protein, 124 aa, synthetic construct
QVQLVQSGAEVKKPGSSVKVSCKASPRGFYGYHMHWVRQAPGQGLEWMGYINPYKNAIQYNQKFQGRVTITADKSTTTAYMELSSLRSEDTAVYYCARGNGKWGDGAYRFFDFWGQGTLVTVSS

SEQ ID NO: 8120 - skipped

SEQ ID NO: 8121 - protein, 124 aa, synthetic construct
QVQLVQSGAEVKKPGSSVKVSCKASPRGFYGYHMHWVRQAPGQGLEWMGAINPYNTDIQYNERFRGRVTITSDKSTTTAYMELSSLRSEDTAVYYCARGNGKWGDGAYRFFDFWGQGTLVTVSS

SEQ ID NO: 8122 - protein, 112 aa, synthetic construct
DVVMTQSPLSLPVTLGQPASISCRSSENLVHSNGRTYLQWYQQRPGQSPRLLIYRVSNRFPGVPDRFSGSGSGTDFTLKISRVEAEDVGVYFCSQSSHIPYTFGGGTKVEIK

SEQ ID NO: 8123 - protein, 124 aa, synthetic construct
QVQLVQSGAEVKKPGSSVKVSCKASPRGFYGYHMHWVRQAPGQGLEWMGSINPYNGDIQYNERFRGRVTITSDKSTTTAYMELSSLRSEDTAVYYCARGNGKWGDGAYRFFDFWGQGTLVTVSS

SEQ ID NO: 8124 - protein, 112 aa, synthetic construct
DVVMTQSPLSLPVTLGQPASISCRSSQNLVHSNGRTYLQWYQQRPGQSPRLLIYRVSNRFPGVPDRFSGSGSGTDFTLKISRVEAEDVGVYFCSQSTHLPYTFGGGTKVEIK

SEQ ID NO: 8125 - protein, 124 aa, synthetic construct
QVQLVQSGAEVKKPGSSVKVSCKASPRGFYGYHMHWVRQAPGQGLEWMGTINPYNHDAQYNERFRGRVTITSDKSTTTAYMELSSLRSEDTAVYYCARGNGKWGDGAYRFFDFWGQGTLVTVSS

SEQ ID NO: 8126 - skipped

SEQ ID NO: 8127 - protein, 124 aa, synthetic construct
QVQLVQSGAEVKKPGSSVKVSCKASPRGFYGYHMHWVRQAPGQGLEWMGFINPYNHAIKYNQKFQGRVTITADKSTSTAYMELSSLRSEDTAVYYCARGNGKWGDGAYRFFDFWGQGTLVTVSS

SEQ ID NO: 8128 - protein, 112 aa, synthetic construct; identical to SEQ ID NO: 7418

SEQ ID NO: 8129 - protein, 124 aa, synthetic construct
QVQLVQSGAEVKKPGSSVKVSCKASPRGFYGYHMHWVRQAPGQGLEWMGYINPYNNAIQYNQKFQGRVTMTSDKSTTTAYMELSSLRSEDTAVYYCARGNGKWGDGAYRFFDFWGQGTLVTVSS

SEQ ID NO: 8130 - protein, 112 aa, synthetic construct; identical to SEQ ID NO: 8099

SEQ ID NO: 8131 - protein, 124 aa, synthetic construct
QVQLVQSGAEVKKPGSSVKVSCKASPRGFYGYHMHWVRQAPGQGLEWMGFINPYTNDIQYNERFRGRVTITSDKSTTTAYMELSSLRSEDTAVYYCAMGNGKWGDGAYRFFDLWGQGTLVTVSS

SEQ ID NO: 8132 - protein, 112 aa, synthetic construct; identical to SEQ ID NO: 8095

SEQ ID NO: 8133 - protein, 124 aa, synthetic construct
QVQLVQSGAEVKKPGSSVKVSCKASPRGFYGYHMHWVRQAPGQGLEWMGAINPYTNEIKYNERFRGRVTITSDESTTTAYMELSSLRSEDTAVYYCARGNGKWGDGAYRFFDFWGQGTLVTVSS

SEQ ID NO: 8134 - protein, 112 aa, synthetic construct; identical to SEQ ID NO: 8124

SEQ ID NO: 8135 - protein, 124 aa, synthetic construct; identical to SEQ ID NO: 8096

SEQ ID NO: 8136 - protein, 112 aa, synthetic construct; identical to SEQ ID NO: 7419

SEQ ID NO: 8137 - protein, 124 aa, synthetic construct
QVQLVQSGAEVKKPGSSVKVSCKASPRGFYGYHMHWVRQAPGQGLEWMGAINPYNDDIQYNERFRGRVTITSDESTTTAYMELSSLRSEDTAVYYCALGNGKWGDGAYRFFDFWGQGTLVTVSS

SEQ ID NO: 8138 - protein, 112 aa, synthetic construct; identical to SEQ ID NO: 7419

SEQ ID NO: 8139 - protein, 124 aa, synthetic construct
QVQLVQSGAEVKKPGASVKVSCKASPRGFHGYHMHWVRQAPGQGLEWMGYINPYNNDIKYNQKFQGRVTITADESTSTAYMELSSLRSEDTAVYYCARGNGKWGDGAYRFFDFWGQGTLVTVSS

SEQ ID NO: 8140 - protein, 112 aa, synthetic construct; identical to SEQ ID NO: 8099

SEQ ID NO: 8141 - protein, 124 aa, synthetic construct
QVQLVQSGAEVKKPGSSVKVSCKASPRGFHGYHMHWVRQAPGQGLEWMGFINPYTNDIQYNERFRGRVTITSDESTTTAYMELSSLRSEDTAVYYCALGNGKWGDGAYRFFDLWGQGTLVTVSS

SEQ ID NO: 8142 - protein, 112 aa, synthetic construct; identical to SEQ ID NO: 8099

SEQ ID NO: 8143 - protein, 124 aa, synthetic construct
QVQLVQSGAEVKKPGSSVKVSCKASPRGFYGYHMHWVRQAPGQGLEWMGTINPYKHHIKYNERFRGRVTITSDESTTTAYMELSSLRSEDTAVYYCARGNGKWGDGAYRFFDLWGQGTLVTVSS

SEQ ID NO: 8144 - protein, 112 aa, synthetic construct
DVVMTQSPLSLPVTLGQPASISCRSSENLVHSNGRTYLQWYQQRPGQSPRLLIYRVSNRFPGVPDRFSGSGSGTDFTLKISRVEAEDVGVYFCSQSTQEPYTFGGGTKVEIK

SEQ ID NO: 8145 - protein, 124 aa, synthetic construct
QVQLVQSGAEVKKPGSSVKVSCKASPRGFYGYHMHWVRQAPGQGLEWMGTINPYNGDIQYNERFRGRVTITSDESTTTAYMELSSLRSEDTAVYYCARGNGKWGDGAYRFFDFWGQGTLVTVSS

SEQ ID NO: 8146 - protein, 112 aa, synthetic construct; identical to SEQ ID NO: 7419

SEQ ID NO: 8147 - protein, 124 aa, synthetic construct
QVQLVQSGAEVKKPGSSVKVSCKASPRGFYGYHMHWVRQAPGQGLEWMGAINPYNDDIKYNERFRGRVTITSDKSTTTAYMELSSLRSEDTAVYYCALGNGKWGDGAYRFFDFWGQGTLVTVSS

SEQ ID NO: 8148 - protein, 112 aa, synthetic construct; identical to SEQ ID NO: 8099

SEQ ID NO: 8149 - protein, 124 aa, synthetic construct
QVQLVQSGAEVKKPGSSVKVSCKASPRGFYGYHMHWVRQAPGQGLEWMGYINPYTHEIKYNERFRGRVTITSDESTTTAYMELSSLRSEDTAVYYCARGNGKWGDGAYRFFDFWGQGTLVTVSS

SEQ ID NO: 8150 - protein, 112 aa, synthetic construct
DVVMTQSPLSLPVTLGQPASISCRSSKNLVHSNARTYLQWYQQRPGQSPRLLIYRVSNRFPGVPDRFSGSGSGTDFTLKISRVEAEDVGVYFCSQSTHVPYTFGGGTKVEIK

SEQ ID NO: 8151 - protein, 124 aa, synthetic construct
QVQLVQSGAEVKKPGSSVKVSCKASPRGFYGYHMHWVRQAPGQGLEWMGFINPYKDDIKYNERFRGRVTITSDKSTTTAYMELSSLRSEDTAVYYCALGNGKWGDGAYRFFDFWGQGTLVTVSS

SEQ ID NO: 8152 - protein, 112 aa, synthetic construct
DVVMTQSPLSLPVTLGQPASISCRSSKNLVHSNGRTYLQWYQQRPGQSPRLLIYRVSNRFPGVPDRFSGSGSGTDFTLKISRVEAEDVGVYFCSQSSLVPYTFGGGTKVEIK

SEQ ID NO: 8153 - protein, 124 aa, synthetic construct
QVQLVQSGAEVKKPGSSVKVSCKASPRGFYGYHMHWVRQAPGQGLEWMGAINPYNDDIQSNERFRGRVTITSDKSTTTAYMELSSLRSEDTAVYYCARGNGKWGDGAYRFFDFWGQGTLVTVSS

SEQ ID NO: 8154 - protein, 112 aa, synthetic construct; identical to SEQ ID NO: 7418

SEQ ID NO: 8155 - protein, 124 aa, synthetic construct
QVQLVQSGAEVKKPGSSVKVSCKASPRGFYGYHMHWVRQAPGQGLEWMGAINPYNDDIKYNQKFQGRVTITADESTTTAYMELSSLRSEDTAVYYCARGNGKWGDGAYRFFDFWGQGTLVTVSS

SEQ ID NO: 8156 - protein, 112 aa, synthetic construct; identical to SEQ ID NO: 7418

SEQ ID NO: 8157 - protein, 124 aa, synthetic construct
QVQLVQSGAEVKKPGSSLKVSCKASPRGFHGYHMHWVRQAPGQGLEWMGAINPYNRDIKYNERFRGRVTITSDESTTTAYMELSSLRSEDTAVYYCARGNGKWGDGAYRFFDLWGQGTLVTVSS

SEQ ID NO: 8158 - protein, 112 aa, synthetic construct
DVVMTQSPLSLPVTLGQPASISCRSSKNLVHSNGRTYLQWYQQRPGQSPRLLIYRVSNRFPGVPDRFSGSGSGTDFTLKISRVEAEDVGVYFCSQSTHVPYTFGGGTKVEIK

SEQ ID NO: 8159 - protein, 124 aa, synthetic construct
QVQLVQSGAEVKKPGSSVKVSCKASPRGFYGYHMHWVRQAPGQGLEWMGAINPYNGDIKYNERFRGRVTITSDKSTTTAYMELSSLRSEDTAVYYCARGNGKWGDGAYRFFDFWGQGTLVTVSS

SEQ ID NO: 8160 - protein, 112 aa, synthetic construct; identical to SEQ ID NO: 7419

SEQ ID NO: 8161 - protein, 124 aa, synthetic construct; identical to SEQ ID NO: 8013

SEQ ID NO: 8162 - protein, 112 aa, synthetic construct; identical to SEQ ID NO: 8014

SEQ ID NO: 8163 - protein, 124 aa, synthetic construct
QVQLVQSGAEVKKPGSSVKVSCKASPRGFYGYHMHWVRQAPGQGLEWMGYINPYTRDIKYNERFRGRVTITSDESTTTAYMELSSLRSEDTAVYYCARGNGKWGDGAYRFFDFWGQGTLVTVSS

SEQ ID NO: 8164 - protein, 112 aa, synthetic construct
DVVMTQSPLSLPVTLGQPASISCRSSQNLVHSNGRTYLQWYQQRPGQSPRLLIYRVSNRFPGVPDRFSGSGSGTDFTLKISRVEAEDVGVYFCSQSTQMPYTFGGGTKVEIK

SEQ ID NO: 8165 - protein, 124 aa, synthetic construct
QVQLVQSGAEVKKPGSSVKVSCKASPRGFYGYHMHWVRQAPGQGLEWMGTINPYNTDIKYNERFRGRVTITSDKSTTTAYMELSSLRSEDTAVYYCARGNGKWGDGAYRFFDLWGQGTLVTVSS

SEQ ID NO: 8166 - protein, 112 aa, synthetic construct
DVVMTQSPLSLPVTLGQPASISCRSSQNLVHSNARTYLQWYQQRPGQSPRLLIYRVSNRFPGVPDRFSGSGSGTDFTLKISRVEAEDVGVYFCSQSTYEPYTFGGGTKVEIK

SEQ ID NO: 8167 - protein, 124 aa, synthetic construct
QVQLVQSGAEVKKPGSSVKVSCKASPRGFYGYHMHWVRQAPGQGLEWMGTINPYNNDIQYNERFRGRVTITSDKSTTTAYMELSSLRSEDTAVYYCARGNGKWGDGAYRFFDFWGQGTLVTVSS

SEQ ID NO: 8168 - protein, 112 aa, synthetic construct
DVVMTQSPLSLPVTLGQPASISCRSSQNLVHSNGRTYLHWYLQKPGQSPQLLIYRVSNRFPGVPDRFSGSGSGTDFTLKISRVEAEDVGVYFCSQSTHVPYTFGGGTKVEIK

SEQ ID NO: 8169 - protein, 124 aa, synthetic construct
QVQLVQSGAEVKKPGSSVKVSCKASPRGFYGYHMHWVRQAPGQGLEWMGYINPYNGNIQYNERFRGRVTITSDESTTTAYMELSSLRSEDTAVYYCARGNGKWGDGAYRFFDFWGQGTLVTVSS

SEQ ID NO: 8170 - protein, 112 aa, synthetic construct
DVVMTQSPLSLPVTLGQPASISCRSSKNLVHSNGRTYLQWYQQRPGQSPRLLIYRVSNRFPGVPDRFSGSGSGTDFTLKISRVEAEDVGVYFCSQSSQEPYTFGGGTKVEIK

SEQ ID NO: 8171 - protein, 124 aa, synthetic construct
QVQLVQSGAEVKKPGSSVKVSCKASPRGFYGYHMHWVRQAPGQGLEWMGAINPYTNEIQYNERFRGRVTITSDESTTTAYMELSSLRSEDTAVYYCARGNGKWGDGAYRFFDFWGQGTLVTVSS

SEQ ID NO: 8172 - protein, 112 aa, synthetic construct; identical to SEQ ID NO: 7419

SEQ ID NO: 8173 - protein, 124 aa, synthetic construct
QVQLVQSGAEVKKPGASVKVSCKASPRGFYGYHMHWVRQAPGQGLEWMGSINPYNHDIKYNERFRGRVTITSDKSTTTAYMELSSLRSEDTAVYYCARGNGKWGDGAYRFFDFWGQGTLVTVSS

SEQ ID NO: 8174 - protein, 112 aa, synthetic construct; identical to SEQ ID NO: 7419

SEQ ID NO: 8175 - protein, 124 aa, synthetic construct
QVQLVQSGAEVKKPGSSVKVSCKASPRGFYGYHMHWVRQAPGQGLEWMGFINPYKNEIKYNERFRGRVTITSDESTTTAYMELSSLRSEDTAVYYCARGNGKWGDGAYRFFDFWGQGTLVTVSS

SEQ ID NO: 8176 - protein, 112 aa, synthetic construct; identical to SEQ ID NO: 7419

SEQ ID NO: 8177 - protein, 124 aa, synthetic construct
QVQLVQSGAEVKKPGSSVKVSCKASPRGFYGYHMHWVRQAPGQGLEWMGYINPYNNEIQYNERFRGRVTITSDESTTTAYMELSSLRSEDTAVYYCARGNGKWGDGAYRFFDFWGQGTLVTVSS

SEQ ID NO: 8178 - protein, 112 aa, synthetic construct; identical to SEQ ID NO: 7418

SEQ ID NO: 8179 - protein, 124 aa, synthetic construct
QVQLVQSGAEVKKPGSSVKVSCKASPRGFYGYHMHWVRQAPGQGLEWMGSINPYNRHIQYNERFRGRVTITSDKSTTTAYMELSSLRSEDTAVYYCARGNGKWGDGAYRFFDFWGQGTLVTVSS

SEQ ID NO: 8180 - protein, 112 aa, synthetic construct; identical to SEQ ID NO: 7419

SEQ ID NO: 8181 - protein, 124 aa, synthetic construct
QVQLVQSGAEVKKPGSSVKVSCKASPRGFYGYHMHWVRQAPGQGLEWMGSINPYTREIQYNERFRGRVTITSDKSTTTAYMELSSLRSEDTAVYYCARGNGKWGDGAYRFFDLWGQGTLVTVSS

SEQ ID NO: 8182 - protein, 112 aa, synthetic construct; identical to SEQ ID NO: 8099

SEQ ID NO: 8183 - protein, 124 aa, synthetic construct; identical to SEQ ID NO: 8011

SEQ ID NO: 8184 - protein, 112 aa, synthetic construct; identical to SEQ ID NO: 8012

SEQ ID NO: 8185 - protein, 124 aa, synthetic construct
QVQLVQSGAEVKKPGSSVKVSCKASPRGFYGYHMHWVRQAPGQGLEWMGFINPYNDDIQSNERFQGRVTITADESTSTAYMELSSLRSEDTAVYYCAMGNGKWGDGAYRFFDLWGQGTLVTVSS

SEQ ID NO: 8186 - protein, 112 aa, synthetic construct; identical to SEQ ID NO: 8099

SEQ ID NO: 8187 - protein, 124 aa, synthetic construct
QVQLVQSGAEVKKPGSSVKVSCKASPRGFYGYHMHWVRQAPGQGLEWMGSINPYTHNIKYNERFRGRVTITSDESTTTAYMELSSLRSEDTAVYYCARGNGKWGDGAYRFFDFWGQGTLVTVSS

SEQ ID NO: 8188 - protein, 112 aa, synthetic construct; identical to SEQ ID NO: 8095

SEQ ID NO: 8189 - protein, 124 aa, synthetic construct
QVQLVQSGAEVKKPGSSVKVSCKASPRGFYGYHMHWVRQAPGQGLEWMGYINPYNHEIKYNQKFQGRVTITADKSTTTAYMELSSLRSEDTAVYYCARGNGKWGDGAYRFFDFWGQGTLVTVSS

SEQ ID NO: 8190 - protein, 112 aa, synthetic construct; identical to SEQ ID NO: 7418

SEQ ID NO: 8191 - protein, 124 aa, synthetic construct
QVQLVQSGAEVKKPGSSVKVSCKASPRGFYGYHMHWVRQAPGQGLEWMGSINPYTRNIQYNQKFRGRVTMTSDKSTTTAYMELSSLRSEDTAVYYCARGNGKWGDGAYRFFDFWGQGTLVTVSS

SEQ ID NO: 8192 - protein, 112 aa, synthetic construct; identical to SEQ ID NO: 7419

SEQ ID NO: 8193 - protein, 124 aa, synthetic construct
QVQLVQSGAEVKKPGSSVKVSCKASPRGFYGYHMHWVRQAPGQGLEWMGYINPYNGAIQYNQKFQGRVTITADESTSTAYMELSSLRSEDTAVYYCARGNGKWGDGAYRFFDLWGQGTLVTVSS

SEQ ID NO: 8194 - protein, 112 aa, synthetic construct; identical to SEQ ID NO: 7419

SEQ ID NO: 8195 - protein, 124 aa, synthetic construct
QVQLVQSGAEVKKPGSSVKVSCKASPRGFYGYHMHWVRQAPGQGLEWMGTINPYTREIQYNQKFQGRVTITADKSTTTAYMELSSLRSEDTAVYYCARGNGKWGDGAYRFFDFWGQGTLVTVSS

SEQ ID NO: 8196 - protein, 112 aa, synthetic construct; identical to SEQ ID NO: 7418

SEQ ID NO: 8197 - protein, 124 aa, synthetic construct
QVQLVQSGAEVKKPGSSVKVSCKASPRGFYGYAMHWVRQAPGQGLEWMGYINPYNNEIQYNQKFQGRVTITADKSTTTAYMELSSLRSEDTAVYYCARGNGKWGDGAYRFFDFWGQGTLVTVSS

SEQ ID NO: 8198 - protein, 112 aa, synthetic construct; identical to SEQ ID NO: 7419

SEQ ID NO: 8199 - protein, 124 aa, synthetic construct
QVQLVQSGAEVKKPGSSVKVSCKASPRGFYGYHMHWVRQAPGQGLEWMGAINPYNHEIQYNQKFQGRVTITADKSTTTAYMELSSLRSEDTAVYYCARGNGKWGDGAYRFFDFWGQGTLVTVSS

SEQ ID NO: 8200 - protein, 112 aa, synthetic construct
DVVMTQSPLSLPVTPGEPASISCRSSQNLVHSNGRTYLQWYLQKPGQSPQLLIYRVSNRFPGVPDRFSGSGSGTDFTLKISRVEAEDVGVYYCSQSTHVPYTFGGGTKVEIK

SEQ ID NO: 8201 - protein, 124 aa, synthetic construct
QVQLVQSGAEVKKPGSSVKVSCKASPRGFHGYHMHWVRQAPGQGLEWMGFINPYNDDIQYNQKFQGRVTITADESTSTAYMELSSLRSEDTAVYYCARGNGKWGDGAYRFFDFWGQGTLVTVSS

SEQ ID NO: 8202 - protein, 112 aa, synthetic construct; identical to SEQ ID NO: 7419

SEQ ID NO: 8203 - protein, 124 aa, synthetic construct
QVQLVQSGAEVKKPGSSVKVSCKASPRGFYGYHMHWVRQAPGQGLEWMGFINPYNDDIQYNQKFQGRVTITADESTSTAYMELSSLRSEDTAVYYCAMGNGKWGDGAYRFFDLWGQGTLVTVSS

SEQ ID NO: 8204 - protein, 112 aa, synthetic construct; identical to SEQ ID NO: 8099

SEQ ID NO: 8205 - protein, 124 aa, synthetic construct
QVQLVQSGAEVKKPGSSVKVSCKASPRGFYGYHMHWVRQAPGQGLEWMGFINPYNHAIKYNQKFQGRVTITADESTSTAYMELSSLRSEDTAVYYCARGNGKWGDGAYRFFDFWGQGTLVTVSS

SEQ ID NO: 8206 - protein, 112 aa, synthetic construct; identical to SEQ ID NO: 7419

SEQ ID NO: 8207 - protein, 10 aa, synthetic construct
RSGFHGYAMH

SEQ ID NO: 8208 - protein, 17 aa, synthetic construct
FINPYNDDIQYNQKFQG

SEQ ID NO: 8209-8210 - skipped (2 entries)

SEQ ID NO: 8211 - protein, 10 aa, synthetic construct
PRGFHGYHMH

SEQ ID NO: 8212 - protein, 17 aa, synthetic construct
YINPYNRDIKYNQKFQG

SEQ ID NO: 8213 - protein, 17 aa, synthetic construct
FINPYNHAIKYNQKFQG

SEQ ID NO: 8214 - protein, 9 aa, synthetic construct
SQSSYVPFT

SEQ ID NO: 8215 - protein, 11 aa, synthetic construct
SRSGFHGYAMH

SEQ ID NO: 8216 - skipped

SEQ ID NO: 8217 - protein, 17 aa, synthetic construct
YINPYTGDIKYNERFRG

SEQ ID NO: 8218-8219 - skipped (2 entries)

SEQ ID NO: 8220 - protein, 16 aa, synthetic construct
MGNGKWGDGAYRFFDL

SEQ ID NO: 8221 - protein, 17 aa, synthetic construct
FINPYNDDIQYNERFRG

SEQ ID NO: 8222 - protein, 17 aa, synthetic construct
TINPYNAEIKYNQKFQG

SEQ ID NO: 8223 - protein, 9 aa, synthetic construct
SQSTYEPFT

SEQ ID NO: 8224 - protein, 16 aa, synthetic construct
LGNGKWGDGAYRFFDL

SEQ ID NO: 8225 - protein, 17 aa, synthetic construct
TINPYNRDIQYNQKFQG

SEQ ID NO: 8226 - protein, 16 aa, synthetic construct
RSSQNLVHSNGRTYLH

SEQ ID NO: 8227 - protein, 15 aa, synthetic construct
GNGKWGDGAYRFFDL

SEQ ID NO: 8228 - protein, 17 aa, synthetic construct
FINPYNRDIKYNERFRG

SEQ ID NO: 8229 - protein, 17 aa, synthetic construct
AINPYTNDIKYNERFRG

SEQ ID NO: 8230 - protein, 17 aa, synthetic construct
AINPYTNHIQYNERFRG

SEQ ID NO: 8231 - protein, 17 aa, synthetic construct
AINPYTRAIKYNERFRG

SEQ ID NO: 8232 - protein, 17 aa, synthetic construct
TINPYNGDIQYNERFRG

SEQ ID NO: 8233 - protein, 17 aa, synthetic construct
AINPYNTDIKYNERFRG

SEQ ID NO: 8234 - protein, 17 aa, synthetic construct
YINPYNGAIKYNQKFQG

SEQ ID NO: 8235 - protein, 17 aa, synthetic construct
AINPYNDDIQSNERFRG

SEQ ID NO: 8236 - protein, 17 aa, synthetic construct
FINPYNRAIQYNQKFQG

SEQ ID NO: 8237 - protein, 17 aa, synthetic construct
FINPYTNEIQYNERFRG

SEQ ID NO: 8238 - protein, 17 aa, synthetic construct
SINPYTHDIQYNERFRG

SEQ ID NO: 8239 - protein, 17 aa, synthetic construct
YINPYKNAIQYNQKFQG

SEQ ID NO: 8240 - protein, 17 aa, synthetic construct
AINPYNTDIQYNERFRG

SEQ ID NO: 8241 - protein, 17 aa, synthetic construct
SINPYNGDIQYNERFRG

SEQ ID NO: 8242 - protein, 17 aa, synthetic construct
TINPYNHDAQYNERFRG

SEQ ID NO: 8243 - protein, 17 aa, synthetic construct
AINPYNDDIKYNERFRG

SEQ ID NO: 8244 - skipped

SEQ ID NO: 8245 - protein, 17 aa, synthetic construct
YINPYTHEIKYNERFRG

SEQ ID NO: 8246 - protein, 17 aa, synthetic construct
FINPYKDDIKYNERFRG

SEQ ID NO: 8247 - protein, 17 aa, synthetic construct
AINPYNDDIKYNQKFQG

SEQ ID NO: 8248 - protein, 17 aa, synthetic construct
AINPYNRDIKYNERFRG

SEQ ID NO: 8249 - protein, 17 aa, synthetic construct
AINPYNGDIKYNERFRG

SEQ ID NO: 8250 - protein, 17 aa, synthetic construct
YINPYTRDIKYNERFRG

SEQ ID NO: 8251 - protein, 17 aa, synthetic construct
TINPYNTDIKYNERFRG

SEQ ID NO: 8252 - protein, 17 aa, synthetic construct
TINPYNNDIQYNERFRG

SEQ ID NO: 8253 - protein, 17 aa, synthetic construct
YINPYNGNIQYNERFRG

SEQ ID NO: 8254 - protein, 17 aa, synthetic construct
AINPYTNEIQYNERFRG

SEQ ID NO: 8255 - protein, 17 aa, synthetic construct
SINPYNHDIKYNERFRG

SEQ ID NO: 8256 - protein, 17 aa, synthetic construct
FINPYKNEIKYNERFRG

SEQ ID NO: 8257 - protein, 18 aa, synthetic construct
YINPYNNEIQYNERFRGR

SEQ ID NO: 8258 - protein, 17 aa, synthetic construct
SINPYNRHIQYNERFRG

SEQ ID NO: 8259 - protein, 17 aa, synthetic construct
SINPYTREIQYNERFRG

SEQ ID NO: 8260 - protein, 17 aa, synthetic construct
FINPYTNDIQYNERFRG

SEQ ID NO: 8261 - protein, 17 aa, synthetic construct
AINPYTNEIKYNERFRG

SEQ ID NO: 8262 - protein, 9 aa, synthetic construct
SQSTHLPYT

SEQ ID NO: 8263 - protein, 17 aa, synthetic construct
AINPYNDDIQYNERFRG

SEQ ID NO: 8264 - protein, 17 aa, synthetic construct
YINPYNNDIKYNQKFQG

SEQ ID NO: 8265 - protein, 9 aa, synthetic construct
SQSTQEPYT

SEQ ID NO: 8266 - protein, 17 aa, synthetic construct
TINPYTREIQYNQKFQG

SEQ ID NO: 8267 - protein, 17 aa, synthetic construct
YINPYNNEIQYNQKFQG

SEQ ID NO: 8268 - protein, 17 aa, synthetic construct
AINPYNHEIQYNQKFQG

SEQ ID NO: 8269 - protein, 17 aa, synthetic construct
TINPYKHHIKYNERFRG

SEQ ID NO: 8270 - protein, 17 aa, synthetic construct
FINPYTRAIKYNERFRG

SEQ ID NO: 8271 - protein, 16 aa, synthetic construct
RSSKNLVHSNARTYLQ

SEQ ID NO: 8272 - protein, 10 aa, synthetic construct
PRGFYGYHMH

SEQ ID NO: 8273 - protein, 17 aa, synthetic construct
SINPYTRHIQYNERFRG

SEQ ID NO: 8274 - protein, 10 aa, synthetic construct
SQSSLLPYTF

SEQ ID NO: 8275 - skipped

SEQ ID NO: 8276 - protein, 16 aa, synthetic construct
RSSQNLVHSNARTYLQ

SEQ ID NO: 8277 - protein, 9 aa, synthetic construct
SQSTLEPFT

SEQ ID NO: 8278 - skipped

SEQ ID NO: 8279 - protein, 9 aa, synthetic construct
SQSSHIPYT

SEQ ID NO: 8280 - protein, 9 aa, synthetic construct
SQSSLVPYT

SEQ ID NO: 8281 - protein, 219 aa, synthetic construct; identical to SEQ ID NO: 8005

SEQ ID NO: 8282 - protein, 115 aa, synthetic construct
DVVMTQSPLSLPVTLGQPASISCCDRRSSKNLVHSNGRTYLQWYQQRPGQSPRLLIYRVSNRFPGVPDRFSGSGSGTDFTLKISRVEAEDVGVYFCSQSTREPYTFGGGTKVEIK

SEQ ID NO: 8283 - protein, 454 aa, synthetic construct
QVQLVQSGAEVKKPGSSVKVSCKASPRGFYGYHMHWVRQAPGQGLEWMGFINPYNNHIQYNERFRGRVTITSDESTTTAYMELSSLRSEDTAVYYCALGIGKWGDGAYRFFDFWGQGTLVTVSSASTKGPSVFPLAPSSKSTSGGTAALGCLVKDYFPEPVTVSWNSGALTSGVHTFPAVLQSSGLYSLSSVVTVPSSSLGTQTYICNVNHKPSNTKVDKRVEPKSCDKTHTCPPCPAPELLGGPSVFLFPPKPKDTLMISRTPEVTCVVVDVSHEDPEVKFNWYVDGVEVHNAKTKPREEQYASTYRVVSVLTVLHQDWLNGKEYKCKVSNKALPAPIEKTISKAKGQPREPQVYTLPPCREEMTKNQVSLWCLVKGFYPSDIAVEWESNGQPENNYKTTPPVLDSDGSFFLYSKLTVDKSRWQQGNVFSCSVMHEALHNHYTQKSLSLSPGK

SEQ ID NO: 8284 - protein, 124 aa, synthetic construct
QVQLVQSGAEVKKPGSSVKVSCKASPRGFYGYHMHWVRQAPGQGLEWMGFINPYNNHIQYNERFRGRVTITSDESTTTAYMELSSLRSEDTAVYYCALGIGKWGDGAYRFFDFWGQGTLVTVSS

SEQ ID NO: 8285 - protein, 15 aa, synthetic construct
GIGKWGDGAYRFFDF

SEQ ID NO: 8286 - protein, 473 aa, synthetic construct; identical to SEQ ID NO: 7383

SEQ ID NO: 8287 - protein, 246 aa, synthetic construct; identical to SEQ ID NO: 7311

SEQ ID NO: 8288 - protein, 12 aa, synthetic construct
GFSITTTGYHWN

SEQ ID NO: 8289-8290 - skipped (2 entries)

SEQ ID NO: 8291 - protein, 20 aa, synthetic construct
GGGGSGGGGSGGGGSGGGGS

SEQ ID NO: 8292 - protein, 219 aa, synthetic construct; identical to SEQ ID NO: 8005

SEQ ID NO: 8293 - skipped

SEQ ID NO: 8294 - protein, 454 aa, synthetic construct
QVQLVQSGAEVKKPGSSVKVSCKASPRGFYGYHMHWVRQAPGQGLEWMGFINPYNNHIQYNERFRGRVTITSDESTTTAYMELSSLRSEDTAVYYCALGVGKWGDGAYRFFDFWGQGTLVTVSSASTKGPSVFPLAPSSKSTSGGTAALGCLVKDYFPEPVTVSWNSGALTSGVHTFPAVLQSSGLYSLSSVVTVPSSSLGTQTYICNVNHKPSNTKVDKRVEPKSCDKTHTCPPCPAPELLGGPSVFLFPPKPKDTLMISRTPEVTCVVVDVSHEDPEVKFNWYVDGVEVHNAKTKPREEQYASTYRVVSVLTVLHQDWLNGKEYKCKVSNKALPAPIEKTISKAKGQPREPQVYTLPPCREEMTKNQVSLWCLVKGFYPSDIAVEWESNGQPENNYKTTPPVLDSDGSFFLYSKLTVDKSRWQQGNVFSCSVMHEALHNHYTQKSLSLSPGK

SEQ ID NO: 8295 - protein, 124 aa, synthetic construct
QVQLVQSGAEVKKPGSSVKVSCKASPRGFYGYHMHWVRQAPGQGLEWMGFINPYNNHIQYNERFRGRVTITSDESTTTAYMELSSLRSEDTAVYYCALGVGKWGDGAYRFFDFWGQGTLVTVSS

SEQ ID NO: 8296 - protein, 15 aa, synthetic construct
GVGKWGDGAYRFFDF

SEQ ID NO: 8297 - protein, 219 aa, synthetic construct; identical to SEQ ID NO: 8005

SEQ ID NO: 8298 - protein, 454 aa, synthetic construct; identical to SEQ ID NO: 8007

SEQ ID NO: 8299 - protein, 124 aa, synthetic construct; identical to SEQ ID NO: 8020

SEQ ID NO: 8300 - skipped

SEQ ID NO: 8301 - protein, 219 aa, synthetic construct; identical to SEQ ID NO: 8005

SEQ ID NO: 8302 - protein, 454 aa, synthetic construct; identical to SEQ ID NO: 8009

SEQ ID NO: 8303 - protein, 124 aa, synthetic construct
QVQLVQSGAEVKKPGSSVKVSCKASPRGFYGYHMHWVRQAPGQGLEWMGFINPYNNHIQYNERFRGRVTITSDESTTTAYMELSSLRSEDTAVYYCALGAGKWGDGAYRFFDFWGQGTLVTVSS

SEQ ID NO: 8304 - protein, 124 aa, synthetic construct; identical to SEQ ID NO: 517

SEQ ID NO: 8305 - protein, 10 aa, synthetic construct
GYTFTGYVMH

SEQ ID NO: 8306 - protein, 227 aa, synthetic construct; identical to SEQ ID NO: 3648

SEQ ID NO: 8307 - protein, 219 aa, synthetic construct; identical to SEQ ID NO: 7380

SEQ ID NO: 8308 - protein, 112 aa, synthetic construct; identical to SEQ ID NO: 258

SEQ ID NO: 8309 - protein, 454 aa, synthetic construct; identical to SEQ ID NO: 7382

SEQ ID NO: 8310 - protein, 124 aa, synthetic construct; identical to SEQ ID NO: 517

SEQ ID NO: 8311-8399 - skipped (89 entries)

SEQ ID NO: 8400 - protein, 25 aa, synthetic construct
EVRLQQSGPDLIKPGASVKMSCKAS

SEQ ID NO: 8401 - protein, 10 aa, synthetic construct
GYTFTGYVMH

SEQ ID NO: 8402 - protein, 25 aa, synthetic construct [sequence omitted]

SEQ ID NO: 8403 - protein, 25 aa, synthetic construct [sequence omitted]

SEQ ID NO: 8404 - protein, 25 aa, synthetic construct [sequence omitted]

SEQ ID NO: 8405 - protein, 25 aa, synthetic construct [sequence omitted]

SEQ ID NO: 8406-8505 - skipped (100 entries)

SEQ ID NO: 8506 - protein, 25 aa, synthetic construct
EVRLQQSGPDLIKPGASVKMSCKAS

SEQ ID NO: 8507 - protein, 10 aa, synthetic construct
GYTFTGYVMH

SEQ ID NO: 8508 - protein, 25 aa, synthetic construct [sequence omitted]

SEQ ID NO: 8509 - protein, 25 aa, synthetic construct [sequence omitted]

SEQ ID NO: 8510 - protein, 25 aa, synthetic construct [sequence omitted]

SEQ ID NO: 8511 - protein, 25 aa, synthetic construct [sequence omitted]

SEQ ID NO: 8512 - protein, 25 aa, synthetic construct [sequence omitted]

SEQ ID NO: 8513 - protein, 10 aa, synthetic construct
GYTFSGYAIS

SEQ ID NO: 8514 - protein, 25 aa, synthetic construct [sequence omitted]

SEQ ID NO: 8515 - protein, 25 aa, synthetic construct [sequence omitted]

SEQ ID NO: 8516 - protein, 25 aa, synthetic construct [sequence omitted]

SEQ ID NO: 8517 - protein, 10 aa, synthetic construct
GYTFTGYVMH

SEQ ID NO: 8518 - protein, 25 aa, synthetic construct [sequence omitted]

SEQ ID NO: 8519 - protein, 10 aa, synthetic construct
GYTFTGYVMH

SEQ ID NO: 8520 - protein, 25 aa, synthetic construct [sequence omitted]

SEQ ID NO: 8521 - protein, 10 aa, synthetic construct
GYTFTGYVMH

SEQ ID NO: 8522 - protein, 25 aa, synthetic construct [sequence omitted]

SEQ ID NO: 8523 - protein, 10 aa, synthetic construct
GYTFTGYVMH

SEQ ID NO: 8524 - protein, 25 aa, synthetic construct [sequence omitted]

SEQ ID NO: 8525 - protein, 10 aa, synthetic construct
GYTFTGYVMH

SEQ ID NO: 8526 - protein, 25 aa, synthetic construct [sequence omitted]

SEQ ID NO: 8527 - protein, 10 aa, synthetic construct
GYTFTGYVMH

SEQ ID NO: 8528 - protein, 25 aa, synthetic construct [sequence omitted]

SEQ ID NO: 8529 - protein, 10 aa, synthetic construct
GYTFPGFVMH

SEQ ID NO: 8530 - protein, 25 aa, synthetic construct [sequence omitted]

SEQ ID NO: 8531 - protein, 10 aa, synthetic construct
GYPFHGYVMH

SEQ ID NO: 8532 - protein, 25 aa, synthetic construct [sequence omitted]

SEQ ID NO: 8533 - protein, 10 aa, synthetic construct
GYTYPGYVMH

SEQ ID NO: 8534 - protein, 25 aa, synthetic construct [sequence omitted]

SEQ ID NO: 8535 - protein, 10 aa, synthetic construct
NQNFHGYHMH

SEQ ID NO: 8536 - protein, 25 aa, synthetic construct [sequence omitted]

SEQ ID NO: 8537 - protein, 10 aa, synthetic construct
SQNFHGFYMH

SEQ ID NO: 8538 - protein, 25 aa, synthetic construct [sequence omitted]

SEQ ID NO: 8539 - protein, 10 aa, synthetic construct
YQDFHGYKMH

SEQ ID NO: 8540 - protein, 25 aa, synthetic construct [sequence omitted]

SEQ ID NO: 8541 - protein, 10 aa, synthetic construct
GYNFHGFYMH

SEQ ID NO: 8542 - protein, 25 aa, synthetic construct [sequence omitted]

SEQ ID NO: 8543 - protein, 10 aa, synthetic construct
TSGFHGYPMH

SEQ ID NO: 8544 - protein, 25 aa, synthetic construct [sequence omitted]

SEQ ID NO: 8545 - protein, 10 aa, synthetic construct
PRGFHGYHMH

SEQ ID NO: 8546 - protein, 30 aa, synthetic construct; identical to SEQ ID NO: 7426

SEQ ID NO: 8547 - protein, 5 aa, synthetic construct
GYAMH

SEQ ID NO: 8548 - protein, 25 aa, synthetic construct [sequence omitted]

SEQ ID NO: 8549 - protein, 10 aa, synthetic construct
SKDFHGFAMH

SEQ ID NO: 8550 - protein, 25 aa, synthetic construct [sequence omitted]

SEQ ID NO: 8551 - protein, 10 aa, synthetic construct
PKGFHGYHMH

SEQ ID NO: 8552 - skipped

SEQ ID NO: 8553 - protein, 25 aa, synthetic construct
QIQLQESGPGLVKPSQSLSLTCSVT

SEQ ID NO: 8554 - protein, 12 aa, synthetic construct
GFSINTGGYHWN

SEQ ID NO: 8555 - protein, 25 aa, synthetic construct
QIQLQESGPGLVKPSQSLSLTCSVT

SEQ ID NO: 8556 - protein, 12 aa, synthetic construct
GFSINTGGYHWN

SEQ ID NO: 8557 - protein, 25 aa, synthetic construct
QIQLQESGPGLVKPSETLSLTCTVS

SEQ ID NO: 8558 - protein, 12 aa, synthetic construct
GFSINTGGYHWN

SEQ ID NO: 8559 - protein, 25 aa, synthetic construct
QIQLQESGPGLVKPSQTLSLTCTVS

SEQ ID NO: 8560 - protein, 12 aa, synthetic construct
GFSINTGGYHWN

SEQ ID NO: 8561 - protein, 25 aa, synthetic construct
EIQLLESGGGLVQPGGSLRLSCAVS

SEQ ID NO: 8562 - protein, 12 aa, synthetic construct
GFSINTGGYHWN

SEQ ID NO: 8563 - protein, 25 aa, synthetic construct
QIQLVQSGAEVKKPGSSVKVSCKVS

SEQ ID NO: 8564 - protein, 12 aa, synthetic construct
GFSINTGGYHWN

SEQ ID NO: 8565 - protein, 25 aa, synthetic construct
EIQLVESGGGLVQPGGSLRLSCAVS

SEQ ID NO: 8566 - protein, 12 aa, synthetic construct
GFSINTGGYHWN

SEQ ID NO: 8567 - protein, 25 aa, synthetic construct
QIQLVQSGAEVKKPGASVKVSCKVS

SEQ ID NO: 8568 - protein, 12 aa, synthetic construct
GFSINTGGYHWN

SEQ ID NO: 8569 - protein, 25 aa, synthetic construct
QIQLQESGPGLVKPSQTLSLTCTVS

SEQ ID NO: 8570 - protein, 12 aa, synthetic construct
GFSINTGGYHWN

SEQ ID NO: 8571 - protein, 25 aa, synthetic construct
QIQLQESGPGLVKPSETLSLTCTVS

SEQ ID NO: 8572 - protein, 12 aa, synthetic construct
GFSINTGGYHWN

SEQ ID NO: 8573 - protein, 25 aa, synthetic construct
EIQLLESGGGLVQPGGSLRLSCAVS

SEQ ID NO: 8574 - protein, 12 aa, synthetic construct
GFSINTGGYHWN

SEQ ID NO: 8575 - protein, 25 aa, synthetic construct
QIQLVESGGGLVKPGGSLRLSCAVS

SEQ ID NO: 8576 - protein, 12 aa, synthetic construct
GFSINTGGYHWN

SEQ ID NO: 8577 - protein, 25 aa, synthetic construct
QIQLVQSGAEVKKPGASVKVSCKVS

SEQ ID NO: 8578 - protein, 12 aa, synthetic construct
GFSINTGGYHWN

SEQ ID NO: 8579 - protein, 25 aa, synthetic construct
EIQLVQSGAEVKKPGATVKISCKVS

SEQ ID NO: 8580 - protein, 12 aa, synthetic construct
GFSINTGGYHWN

SEQ ID NO: 8581 - protein, 25 aa, synthetic construct
QIQLQESGPGLVKPSQSLSLTCSVT

SEQ ID NO: 8582 - protein, 12 aa, synthetic construct
GFSINTGGYHWN

SEQ ID NO: 8583 - protein, 25 aa, synthetic construct
QIQLQESGPGLVKPSQSLSLTCSVT

SEQ ID NO: 8584 - protein, 12 aa, synthetic construct
GFSINTGGYHWN

SEQ ID NO: 8585 - protein, 25 aa, synthetic construct
QIQLQESGPGLVKPSETLSLTCTVS

SEQ ID NO: 8586 - protein, 12 aa, synthetic construct
GFSINTGGYHWN

SEQ ID NO: 8587 - protein, 25 aa, synthetic construct
QIQLQESGPGLVKPSQTLSLTCTVS

SEQ ID NO: 8588 - protein, 12 aa, synthetic construct
GFSINTGGYHWN

SEQ ID NO: 8589 - protein, 25 aa, synthetic construct
EIQLLESGGGLVQPGGSLRLSCAVS

SEQ ID NO: 8590 - protein, 12 aa, synthetic construct
GFSINTGGYHWN

SEQ ID NO: 8591 - protein, 25 aa, synthetic construct
QIQLVQSGAEVKKPGSSVKVSCKVS

SEQ ID NO: 8592 - protein, 12 aa, synthetic construct
GFSINTGGYHWN

SEQ ID NO: 8593 - protein, 25 aa, synthetic construct
EIQLVESGGGLVQPGGSLRLSCAVS

SEQ ID NO: 8594 - protein, 12 aa, synthetic construct
GFSINTGGYHWN

SEQ ID NO: 8595 - protein, 25 aa, synthetic construct
QIQLVQSGAEVKKPGASVKVSCKVS

SEQ ID NO: 8596 - protein, 12 aa, synthetic construct
GFSINTGGYHWN

SEQ ID NO: 8597 - protein, 25 aa, synthetic construct
QIQLQESGPGLVKPSQTLSLTCTVS

SEQ ID NO: 8598 - protein, 12 aa, synthetic construct
GFSINTGGYHWN

SEQ ID NO: 8599 - protein, 25 aa, synthetic construct
QIQLQESGPGLVKPSETLSLTCTVS

SEQ ID NO: 8600 - protein, 12 aa, synthetic construct
GFSINTGGYHWN

SEQ ID NO: 8601 - protein, 25 aa, synthetic construct
EIQLLESGGGLVQPGGSLRLSCAVS

SEQ ID NO: 8602 - protein, 12 aa, synthetic construct
GFSINTGGYHWN

SEQ ID NO: 8603 - protein, 25 aa, synthetic construct
QIQLVESGGGLVKPGGSLRLSCAVS

SEQ ID NO: 8604 - protein, 12 aa, synthetic construct
GFSINTGGYHWN

SEQ ID NO: 8605 - protein, 25 aa, synthetic construct
QIQLVQSGAEVKKPGASVKVSCKVS

SEQ ID NO: 8606 - protein, 12 aa, synthetic construct
GFSINTGGYHWN

SEQ ID NO: 8607 - protein, 25 aa, synthetic construct
EIQLVQSGAEVKKPGATVKISCKVS

SEQ ID NO: 8608 - protein, 12 aa, synthetic construct
GFSINTGGYHWN

SEQ ID NO: 8609 - protein, 25 aa, synthetic construct
QIQLQESGPGLVKPSQSLSLSCSVT

SEQ ID NO: 8610 - protein, 12 aa, synthetic construct
GFSINTGGYHWN

SEQ ID NO: 8611 - protein, 25 aa, synthetic construct
QIQLQESGPGLVKPSQSLSLTCSVT

SEQ ID NO: 8612 - protein, 12 aa, synthetic construct
GFSINTGGYHWN

SEQ ID NO: 8613 - protein, 25 aa, synthetic construct
QIQLQESGPGLVKPSQSLSLTCSVT

SEQ ID NO: 8614 - protein, 12 aa, synthetic construct
GFSINTGGYHWN

SEQ ID NO: 8615 - protein, 25 aa, synthetic construct
QIQLQESGPGLVKPSQSLSLSCSVT

SEQ ID NO: 8616 - protein, 12 aa, synthetic construct
GFSITTTGYHWN

SEQ ID NO: 8617 - protein, 25 aa, synthetic construct
QIQLQESGPGLVKPSQTLSLTCTVS

SEQ ID NO: 8618 - protein, 12 aa, synthetic construct
GFSITTTGYHWN

SEQ ID NO: 8619 - protein, 25 aa, synthetic construct
QIQLVESGGGLVKPGGSLRLSCAVS

SEQ ID NO: 8620 - protein, 12 aa, synthetic construct
GFSITTTGYHWN

SEQ ID NO: 8621 - protein, 25 aa, synthetic construct
EIQLLESGGGLVQPGGSLRLSCAVS

SEQ ID NO: 8622 - protein, 12 aa, synthetic construct
GFSITTTGYHWN

SEQ ID NO: 8623 - protein, 25 aa, synthetic construct
EIQLVESGGGLVQPGGSLRLSCAVS

SEQ ID NO: 8624 - protein, 12 aa, synthetic construct
GFSITTTGYHWN

SEQ ID NO: 8625 - protein, 25 aa, synthetic construct
QIQLVQSGAEVKKPGASVKVSCKVS

SEQ ID NO: 8626 - protein, 12 aa, synthetic construct
GFSITTTGYHWN

SEQ ID NO: 8627 - protein, 25 aa, synthetic construct
EIQLLESGGGLVQPGGSLRLSCAVS

SEQ ID NO: 8628 - protein, 12 aa, synthetic construct
GFSITTTGYHWN

SEQ ID NO: 8629 - protein, 25 aa, synthetic construct
EIQLLESGGGLVQPGGSLRLSCAVS

SEQ ID NO: 8630 - protein, 12 aa, synthetic construct
GFSITTTGYHWN

SEQ ID NO: 8631 - protein, 25 aa, synthetic construct
EIQLLESGGGLVQPGGSLRLSCAVS

SEQ ID NO: 8632 - protein, 12 aa, synthetic construct
GFSITTTGYHWN

SEQ ID NO: 8633 - protein, 25 aa, synthetic construct
EIQLLESGGGLVQPGGSLRLSCAVS

SEQ ID NO: 8634 - protein, 12 aa, synthetic construct
GFSITTTGYHWN

SEQ ID NO: 8635 - protein, 25 aa, synthetic construct
EIQLLESGGGLVQPGGSLRLSCAVS

SEQ ID NO: 8636 - protein, 12 aa, synthetic construct
GFSITTTGYHWN

SEQ ID NO: 8637 - protein, 25 aa, synthetic construct
EIQLLESGGGLVQPGGSLRLSCAVS

SEQ ID NO: 8638 - protein, 12 aa, synthetic construct
GFSITTTGYHWN

SEQ ID NO: 8639 - protein, 25 aa, synthetic construct
EIQLLESGGGLVQPGGSLRLSCAVS

SEQ ID NO: 8640 - protein, 12 aa, synthetic construct
GFSITTTGYHWN

SEQ ID NO: 8641 - protein, 25 aa, synthetic construct
EIQLLESGGGLVQPGGSLRLSCAVS

SEQ ID NO: 8642 - protein, 12 aa, synthetic construct
GFSITTTGYHWN

SEQ ID NO: 8643 - protein, 5 aa, synthetic construct
GYVMH

SEQ ID NO: 8644-8645 - skipped (2 entries)

SEQ ID NO: 8646 - protein, 16 aa, synthetic construct
RSSQRLVHSNGNTYLH

SEQ ID NO: 8647-8650 - skipped (4 entries)

SEQ ID NO: 8651 - protein, 16 aa, synthetic construct
RSSQRLVHSNGNTYLH

SEQ ID NO: 8652-8653 - skipped (2 entries)

SEQ ID NO: 8654 - protein, 17 aa, synthetic construct
FINPYNDDIQSNERFRG

SEQ ID NO: 8655 - skipped

SEQ ID NO: 8656 - protein, 16 aa, synthetic construct
RSSQRLVHSNGNTYLH

SEQ ID NO: 8657-8660 - skipped (4 entries)

SEQ ID NO: 8661 - protein, 16 aa, synthetic construct
RSSQRLVHSNGNTYLH

SEQ ID NO: 8662-8663 - skipped (2 entries)

SEQ ID NO: 8664 - protein, 17 aa, synthetic construct
FINPYNDDIQSNERFRG

SEQ ID NO: 8665 - skipped

SEQ ID NO: 8666 - protein, 16 aa, synthetic construct
RSSQRLVHSNGNTYLH

SEQ ID NO: 8667 - protein, 14 aa, synthetic construct
WVRQAPGKGLEWVG

SEQ ID NO: 8668 - protein, 32 aa, synthetic construct; identical to SEQ ID NO: 36

SEQ ID NO: 8669 - protein, 106 aa, synthetic construct
DNQLTQSPSFLSASVGDRVTITCRASSSVNYIYWYQQKPGKAPKLLIYYTSNLAPGVPSRFSGSGSGNEYTLTISSLQPEDFATYYCQQFTSSPFTFGQGTKLEIK

SEQ ID NO: 8670 - protein, 15 aa, synthetic construct
WYQQRPGQSPRMLIY

SEQ ID NO: 8671 - protein, 106 aa, synthetic construct
ENVLTQSPATLSVSPGERATLSCRASSSVNYIYWYQQKPGQAPRLLIYYTSNLAPGIPARFSGSGSGNEYTLTISSLQSEDFAVYYCQQFTSSPFTFGQGTKLEIK

SEQ ID NO: 8672 - protein, 32 aa, synthetic construct; identical to SEQ ID NO: 305

SEQ ID NO: 8673 - protein, 105 aa, synthetic construct
SNELTQPPSVSVSPGQTARITCRASSSVNYIYWYQQKSGQAPVLVIYYTSNLAPGIPERFSGSGSGNMYTLTISGAQVEDEADYYCQQFTSSPFTFGTGTKVTVL

SEQ ID NO: 8674 - DNA, 318 bp, synthetic construct
  source 1..318: mol_type = other DNA
gataaccagctgacccagtctcctagcttcctgtctgcctctgtgggcgacagagtgacaattacctgccgggcctcctcctccgtgaactacatctactggtatcagcagaagcccggcaaggcccctaagctgctgatctactacacctccaatctggcccctggcgtgccctctagattttccggatctggctccggcaacgagtataccctgacaatctccagcctgcagcctgaggacttcgccacctactactgccagcagttcacctcctctccattcacctttggccagggcaccaagctggaaatcaaa

SEQ ID NO: 8675 - DNA, 318 bp, synthetic construct
  source 1..318: mol_type = other DNA
gagaatgtgctgacccagtctcctgccacactgtctgttagccctggcgagagagctaccctgagctgcagagcctcttcctccgtgaactacatctactggtatcagcagaagcccggccaggctcctagactgctgatctactacacctccaatctggcccctggcatccctgccagattttccggatctggctccggcaacgagtataccctgaccatctccagcctgcagtccgaggactttgctgtgtactattgccagcagttcacaagcagccctttcacctttggccagggcaccaagctggaaatcaaa

SEQ ID NO: 8676 - protein, 14 aa, synthetic construct
WVRQAPGKGLEWVG

SEQ ID NO: 8677 - protein, 32 aa, synthetic construct; identical to SEQ ID NO: 36

SEQ ID NO: 8678 - protein, 10 aa, synthetic construct
QFWASTNSAV

SEQ ID NO: 8679 - protein, 32 aa, synthetic construct
KATLTSDKSSTTAYMELSSLTSEDSAVYYCAR

SEQ ID NO: 8680 - protein, 10 aa, synthetic construct
SQSTHVPYTF

SEQ ID NO: 8681 - protein, 107 aa, synthetic construct; identical to SEQ ID NO: 3289
  VARIANT 30: note = G, E, A or D
  VARIANT 32: note = R or K
  VARIANT 36: note = Y or H
  VARIANT 56: note = K or S

SEQ ID NO: 8682 - protein, 119 aa, synthetic construct; identical to SEQ ID NO: 3290
  VARIANT 27: note = H, T, G or Y
  VARIANT 28: note = D, T or S
  VARIANT 30: note = H, R, D, K or T
  VARIANT 31: note = L, D, K, T or N
  VARIANT 32: note = W, F, T, I, Y or G
  VARIANT 50: note = R or W
  VARIANT 51: note = V, I or F
  VARIANT 52: note = F, S or Y
  VARIANT 53: note = A or P
  VARIANT 57: note = N or S
  VARIANT 58: note = T, V, Y or I
  VARIANT 59: note = K or R
  VARIANT 98: note = G or V
  VARIANT 100: note = Y or I
  VARIANT 103: note = Y or A
  VARIANT 104: note = D or G

SEQ ID NO: 8683 - protein, 24 aa, synthetic construct
AEAAAKEAAAKEAAAKEAAAKAAA

SEQ ID NO: 8684 - protein, 29 aa, synthetic construct
AEAAAKEAAAKEAAAKEAAAKEAAAKAAA

SEQ ID NO: 8685 - protein, 10 aa, synthetic construct
FGGGTKVEIK

SEQ ID NO: 8686 - protein, 224 aa, synthetic construct
KTHTCPPCPAPELLGGPSVFLFPPKPKDTLMISRTPEVTCVVVDVSHEDPEVKFNWYVDGVEVHNAKTKPREEQYASTYRVVSVLTVLHQDWLNGKEYKCKVSNKALPAPIEKTISKAKGQPREPQVYTLPPCREEMTKNQVSLWCLVKGFYPSDIAVEWESNGQPENNYKTTPPVLDSDGSFFLYSKLTVDKSRWQQGNVFSCSVMHEALHNHYTQKSLSLSP

SEQ ID NO: 8687 - protein, 225 aa, synthetic construct; identical to SEQ ID NO: 511

SEQ ID NO: 8688 - protein, 111 aa, synthetic construct
EIVLTQSPGTLSLSPGERATLSCRASKSVSILGTHLIHWYQQKPGQAPRLLIYAASNLESGIPDRFSGSGSETDFTLTISRLEPEDFAVYFCQQSIEDPWTFGGGTKVEIK

SEQ ID NO: 8689 - protein, 212 aa, synthetic construct
ITCPPPMSVEHADIWVKSYSLYSRERYICNSGFKRKAGTSSLTECVLNKATNVAHWTTPSLKCIRDPALVHQRPAPPSGGSGGGGSGGGSGGGGSGGGNWVNVISDLKKIEDLIQSMHIDATLYTESDVHPSCKVTAMKCFLLELQVISLESGDASIHDTVEQLIILANNSLSSNGNVTESGCKECEELEEKNIKEFLQSFVHIVQMFINTS

SEQ ID NO: 8690 - protein, 470 aa, synthetic construct; identical to SEQ ID NO: 4679

SEQ ID NO: 8691 - protein, 108 aa, synthetic construct
DSVTTQSPLSLPVTLGQPASISCSGEKLSDKYVHWYQQRPGQSPRMLIYENDRRPSGVPDRFSGSNSGNDATLKISRVEAEDVGVYFCQFWDSTASAVFGGGTKVEIK

SEQ ID NO: 8692 - protein, 32 aa, synthetic construct; identical to SEQ ID NO: 7336

SEQ ID NO: 8693 - protein, 473 aa, synthetic construct; identical to SEQ ID NO: 7383

SEQ ID NO: 8694 - protein, 32 aa, synthetic construct; identical to SEQ ID NO: 305

SEQ ID NO: 8695 - protein, 15 aa, synthetic construct
GNGKNFDGAYRFFDF

SEQ ID NO: 8696 - protein, 30 aa, synthetic construct
QVQLVQSGAEVKKPGASVKVSCKASNQNFH

SEQ ID NO: 8697 - protein, 454 aa, synthetic construct
QVQLVQSGAEVKKPGSSVKVSCKASPRGFYGYVMHWVRQAPGQGLEWMGFINPYTNDIQYNERFRGRVTITSDKSTTTAYMELSSLRSEDTAVYYCARGNGKWGDGAYRFFDLWGQGTLVTVSSASTKGPSVFPLAPSSKSTSGGTAALGCLVKDYFPEPVTVSWNSGALTSGVHTFPAVLQSSGLYSLSSVVTVPSSSLGTQTYICNVNHKPSNTKVDKRVEPKSCDKTHTCPPCPAPELLGGPSVFLFPPKPKDTLMISRTPEVTCVVVDVSHEDPEVKFNWYVDGVEVHNAKTKPREEQYASTYRVVSVLTVLHQDWLNGKEYKCKVSNKALPAPIEKTISKAKGQPREPQVYTLPPCREEMTKNQVSLWCLVKGFYPSDIAVEWESNGQPENNYKTTPPVLDSDGSFFLYSKLTVDKSRWQQGNVFSCSVMHEALHNHYTQKSLSLSPGK

SEQ ID NO: 8698 - protein, 472 aa, synthetic construct; identical to SEQ ID NO: 7384

SEQ ID NO: 8699 - protein, 112 aa, synthetic construct
DVVMTQSPLSLPVTLGQPASISCRSSKNLVHSNGRTYLQWYLQKPGQSPQLLIYRVSNRFPGVPDRFSGSGSGTDFTLKISRVEAEDVGVYFCSQSTHVPYTFGGGTKVEIK

SEQ ID NO: 8700 - protein, 17 aa, synthetic construct
YINPYNHDIQYNQKFQG

SEQ ID NO: 8701 - protein, 10 aa, synthetic construct
PRGFYGYAMH

SEQ ID NO: 8702 - protein, 32 aa, synthetic construct; identical to SEQ ID NO: 36

SEQ ID NO: 8703 - protein, 370 aa, synthetic construct; identical to SEQ ID NO: 3340